(19) United States
(12) Patent Application Publication
(10) Pub. No.: US 2017/0145424 A1
(43) Pub. Date: May 25, 2017

(54) COMPOSITIONS AND METHODS FOR ENHANCED INTESTINAL ABSORPTION OF CONJUGATED OLIGOMERIC COMPOUNDS

(71) Applicant: Ionis Pharmaceuticals, Inc., Carlsbad, CA (US)

(72) Inventors: Thazha P. Prakash, Carlsbad, CA (US); Punit P. Seth, Carlsbad, CA (US); Eric E. Swayze, Encinitas, CA (US); Stanley T. Crooke, Carlsbad, CA (US)

(73) Assignee: Ionis Pharmaceuticals, Inc., Carlsbad, CA (US)

(21) Appl. No.: 15/315,672

(22) PCT Filed: Jun. 8, 2015
(86) PCT No.: PCT/US15/34742

§ 371 Date: Dec. 1, 2016

Related U.S. Application Data
(60) Provisional application No. 62/009,119, filed on Jun. 6, 2014.
(60) Provisional application No. 62/032,286, filed on Aug. 1, 2014.
(60) Provisional application No. 62/062,778, filed on Oct. 10, 2014.

(51) Int. Cl. C12N 15/113; A61K 9/00; A61K 47/12

(52) U.S. Cl. CPC C12N 15/1138; A61K 47/12; A61K 9/0053; A61K 9/0031; C12N 15/1137; C12N 15/113; A61K 47/48092; C12N 2310/11; C12N 2310/351; C12N 2310/3341; C12N 2310/315; C12N 2320/32; C12N 2320/51; C12N 2310/321; C12N 2310/341; C12N 2310/322; C12N 2310/346

(57) ABSTRACT

Provided herein are compositions and methods for non-parenteral delivery of conjugated oligomeric compounds. In certain embodiments, compositions and methods are provided for oral delivery of conjugated oligomeric compounds. In certain embodiments, the oligomeric compounds are conjugated to one or more N-acetylgalactosamines or N-acetylgalactosamine analogues.

### SEQUENCE LISTING

[0001] The present application is being filed along with a Sequence Listing in electronic format. The Sequence Listing is provided as a file entitled CORE0127WOSEQ_ST25.txt, created on Jun. 8, 2015, which is 688 Kb in size. The information in the electronic format of the sequence listing is incorporated herein by reference in its entirety.

### BACKGROUND OF THE INVENTION

[0002] The principle behind antisense technology is that an antisense compound hybridizes to a target nucleic acid and modulates the amount, activity, and/or function of the target nucleic acid. For example in certain instances, antisense compounds result in altered transcription or translation of a target. Such modulation of expression can be achieved by, for example, target mRNA degradation or occupancy-based inhibition. An example of modulation of RNA target function by degradation is RNase H-based degradation of the target RNA upon hybridization with a DNA-like antisense compound. Another example of modulation of gene expression by target degradation is RNA interference (RNAi). RNAi refers to antisense-mediated gene silencing through a mechanism that utilizes the RNA-induced silencing complex (RISC). An additional example of modulation of RNA target function is by an occupancy-based mechanism such as is employed naturally by microRNA. MicroRNAs are small non-coding RNAs that regulate the expression of protein-coding RNAs. The binding of an antisense compound to a microRNA prevents that microRNA from binding to its messenger RNA targets, and thus interferes with the function of the microRNA. MicroRNA mimics can enhance native microRNA function. Certain antisense compounds alter splicing of pre-mRNA. Regardless of the specific mechanism, sequence-specificity makes antisense compounds attractive as tools for target validation and gene functionalization, as well as therapeutics to selectively modulate the expression of genes involved in the pathogenesis of diseases.

[0003] Antisense technology is an effective means for modulating the expression of one or more specific gene products and can therefore prove to be uniquely useful in a number of therapeutic, diagnostic, and research applications. Chemically modified nucleosides may be incorporated into antisense compounds to enhance one or more properties, such as nuclease resistance, pharmacokinetics or affinity for a target nucleic acid. In 1998, the antisense compound, Vitravene® (fomivirsen; developed by Isis Pharmaceuticals Inc., Carlsbad, Calif.) was the first antisense drug to achieve marketing clearance from the U.S. Food and Drug Administration (FDA), and is currently a treatment of cytomegalovirus (CMV)-induced retinitis in AIDS patients. For another example, an antisense oligonucleotide targeting ApoB, KYNAMRO™, has been approved by the U.S. Food and Drug Administration (FDA) as an adjunct treatment to lipid-lowering medications and diet to reduce low density lipoprotein-cholesterol (LDL-C), ApoB, total cholesterol (TC), and non-high density lipoprotein-cholesterol (non HDL-C) in patients with homozygous familial hypercholesterolemia (HoFH).

[0004] New chemical modifications have improved the potency and efficacy of antisense compounds, uncovering the potential for oral delivery as well as enhancing subcutaneous administration, decreasing potential for side effects, and leading to improvements in patient convenience. Chemical modifications increasing potency of antisense compounds allow administration of lower doses, which reduces the potential for toxicity, as well as decreasing overall cost of therapy. Modifications increasing the resistance to degradation result in slower clearance from the body, allowing for less frequent dosing. Different types of chemical modifications can be combined in one compound to further optimize the compound's efficacy.

[0005] Advances in the field of biotechnology have led to significant advances in the treatment of diseases such as cancer, genetic diseases, arthritis and AIDS that were previously difficult to treat. Many such advances involve the administration of oligonucleotides and other nucleic acids to a subject, particularly a human subject. The administration of such molecules via parenteral routes has been shown to be effective for the treatment of diseases and/or disorders. See, e.g., Draper et al., U.S. Pat. No. 5,595,978, Jan. 21, 1997, which discloses intravitreal injection as a means for the direct delivery of antisense oligonucleotides to the vitreous humor of the mammalian eye. See also, Robertson, Nature Biotechnology, 1997, 15, 209, and Genetic Engineering News, 1997, 15, 1, each of which discuss the treatment of Crohn's disease via intravenous infusions of antisense oligonucleotides. Non-parenteral routes for administration of oligonucleotides and other nucleic acids (such as oral or rectal delivery or other mucosal routes) offers the promise of simpler, easier and less injurious administration of such nucleic acids without the need for sterile procedures and their concomitant expenses, e.g., hospitalization and/or physician fees. However, the absorption of non-parenterally administered drugs is often poor. There thus is a need to provide compositions and methods to enhance the availability of novel drugs such as oligonucleotides when administered via non-parenteral routes. It is desirable that such new compositions and methods provide for the simple, convenient, practical and optimal non-parenteral delivery of oligonucleotides and other nucleic acids.

[0006] Oral administration of drugs, including oligomeric compounds such as antisense oligonucleotides and other nucleic acids, offers the promise of simpler, easier and less injurious administration without the need for sterile procedures and their concomitant expenses, e.g., hospitalization and/or physician fees. However, the absorption of orally administered drugs is often poor. One approach to enhancing the absorption of orally administered drugs is pulsatile release formulations in which multiple doses of drug are released from a single formulation by the use of delayed release coatings (U.S. Pat. Nos. 7,576,067, 5,508,040, 6,117,450, 5,840,329, 5,814,336, and 5,686,105, the entire contents of which are incorporated herein by reference). There is a need to provide compositions and methods to enhance the absorption and/or bioavailability of orally administered drugs, particularly oligonucleotides. Pharmaceutical compositions comprising an antisense oligonucleotides targeted SMAD7 have also been disclosed for oral administration (U.S. Pat. No. 8,648,186, the entire contents of which are incorporated herein by reference).

[0007] In one animal assay rats fed a standard pelleted diet enriched with sodium decanoate and gapped LNA oligonucleotide targeted to human and mouse apoB mRNA demonstrated a statistically significant dose dependent reduction in total serum cholesterol after one week. The reduced total serum cholesterol was maintained over the course of the dosing period (Hardee et al., Arteriosclerosis, Thrombosis, and Vascular Biology, 2010 Scientific Sessions, April 8-10, San Francisco, Calif., poster P358).

[0008] Various routes and formulations for the delivery of antisense oligonucleotides has also been previously described (“Antisense Drug Technology, Principles, Strategies, and Applications” Edited by Stanley T. Crooke, 2008, Chapter 8, CRC Press, Boca Raton, Fla.; and Sambrook et al.,).

[0009] One approach to oral delivery of poorly absorbed drugs such as polar molecules and bioactive peptides and proteins utilizes a mucoadhesive patch system for drug delivery (PCT International application WO 03/007913 A2, published on Jan. 30, 2003, the entire contents of which are incorporated herein by reference).

[0010] Oral delivery of low-molecular weight heparin has been achieved by conjugation of the haparin to deoxycholic acid (Lee, et al., Circulation, Journal of the American Heart Association, 2001, 104, 3116-3120).

[0011] The use of mucus-penetrating nanoparticles for drug and gene delivery to mucosal tissues is another non-parenteral delivery system that is being examined (Lai et al., Adv. Drug Deliv. Rev., 2009, 61 (2). 158-171).

[0012] Antisense drugs have also been administered by enema in a successful human clinical trial targeting pouchitis (U.S. Pat. No. 8,084,432, the entire contents of which are incorporated herein by reference). There is a need to provide compositions and methods to enhance the absorption and/or bioavailability of rectally administered drugs, particularly oligonucleotides.

### SUMMARY OF THE INVENTION

[0013] In certain embodiments, the present disclosure provides methods and compositions for non-parenteral delivery of oligomeric compounds. In certain embodiments, the present disclosure provides methods and compositions for non-parenteral delivery of oligomeric compounds that result in a reduction in the amount or activity of a nucleic acid transcript in a cell. In certain embodiments, the present disclosure provides methods and compositions for oral delivery of oligomeric compounds. In certain embodiments, the present disclosure provides methods and compositions for oral delivery of oligomeric compounds that result in a reduction in the amount or activity of a nucleic acid transcript in a cell. In certain embodiments, the present disclosure provides compositions comprising conjugated oligomeric compounds. In certain embodiments, the present disclosure provides compositions comprising conjugated antisense compounds. In certain embodiments, the present disclosure provides compositions comprising conjugated antisense compounds comprising an antisense oligonucleotide complementary to a nucleic acid transcript.

[0014] In certain embodiments, the conjugate group of the conjugated oligomeric compounds are targeted to the asialoglycoprotein receptor. The asialoglycoprotein receptor (ASGP-R) has been described previously. See e.g., Park et al., PNAS vol. 102, No. 47, pp 17125-17129 (2005). Such receptors are expressed on liver cells, particularly hepatocytes. Further, it has been shown that compounds comprising clusters of three N-acetylgalactosamine (GalNAc) ligands are capable of binding to the ASGP-R, resulting in uptake of the compound into the cell. See e.g., Khorev et al., Bioorganic and Medicinal Chemistry, 16, 9, pp 5216-5231 (May 2008). Accordingly, conjugates comprising such GalNAc clusters have been used to facilitate uptake of certain compounds into liver cells, specifically hepatocytes. For example it has been shown that certain GalNAc-containing conjugates increase activity of duplex siRNA compounds in liver cells in vivo. In such instances, the GalNAc-containing conjugate is typically attached to the sense strand of the siRNA duplex. Since the sense strand is discarded before the antisense strand ultimately hybridizes with the target nucleic acid, there is little concern that the conjugate will interfere with activity. Typically, the conjugate is attached to the 3′ end of the sense strand of the siRNA. See e.g., U.S. Pat. No. 8,106,022. Certain conjugate groups described herein are more active and/or easier to synthesize than conjugate groups previously described.

[0015] In certain embodiments of the present invention, conjugates are attached to single-stranded antisense compounds such as antisense oligonucleotides, including, but not limited to RNase H based antisense compounds and antisense compounds that alter splicing of a pre-mRNA target nucleic acid. In such embodiments, the conjugate should remain attached to the antisense compound long enough to provide benefit (improved uptake into cells) but then should either be cleaved, or otherwise not interfere with the subsequent steps necessary for activity, such as hybridization to a target nucleic acid and interaction with RNase H or enzymes associated with splicing or splice modulation. This balance of properties is more important in the setting of single-stranded antisense compounds than in siRNA compounds, where the conjugate may simply be attached to the sense strand. Disclosed herein are conjugated single-stranded antisense compounds having improved potency in liver cells in vivo compared with the same antisense compound lacking the conjugate. Given the required balance of properties for these compounds such improved potency is surprising.

[0016] In certain embodiments, conjugate groups herein comprise a cleavable moiety. As noted, without wishing to be bound by mechanism, it is logical that the conjugate should remain on the compound long enough to provide enhancement in uptake, but after that, it is desirable for some portion or, ideally, all of the conjugate to be cleaved, releasing the parent compound (e.g., antisense compound) in its most active form. In certain embodiments, the cleavable moiety is a cleavable nucleoside. Such embodiments take advantage of endogenous nucleases in the cell by attaching the rest of the conjugate (the cluster) to the antisense oligonucleotide through a nucleoside via one or more cleavable bonds, such as those of a phosphodiester linkage. In certain embodiments, the cluster is bound to the cleavable nucleoside through a phosphodiester linkage. In certain embodiments, the cleavable nucleoside is attached to the antisense oligonucleotide (antisense compound) by a phosphodiester linkage. In certain embodiments, the conjugate group may comprise two or three cleavable nucleosides. In such embodiments, such cleavable nucleosides are linked to one another, to the antisense compound and/or to the cluster via cleavable bonds (such as those of a phosphodiester linkage). Certain conjugates herein do not comprise a cleavable nucleoside and instead comprise a cleavable bond. It is shown that that sufficient cleavage of the conjugate from the oligonucleotide is provided by at least one bond that is vulnerable to cleavage in the cell (a cleavable bond).

[0017] In certain embodiments, conjugated antisense compounds are prodrugs. Such prodrugs are administered to an animal and are ultimately metabolized to a more active form. For example, conjugated antisense compounds are cleaved to remove all or part of the conjugate resulting in the active (or more active) form of the antisense compound lacking all or some of the conjugate.

[0018] In certain embodiments, the conjugates herein do not substantially alter certain measures of tolerability. For example, it is shown herein that conjugated antisense compounds are not more immunogenic than unconjugated parent compounds. Since potency is improved, embodiments in which tolerability remains the same (or indeed even if tolerability worsens only slightly compared to the gains in potency) have improved properties for therapy.

[0019] In certain embodiments, the conjugates herein comprise one or more modifications to the galactosyl analogues with substitutions at the anomeric, C2-, C5-, and/or C6-positions. In certain embodiments, the oxygen or hydroxyl moiety at one or more of the anomeric, C2-, C5-, and/or C6-positions is replaced with a sulfur. In certain embodiments, modification to the galactosyl analogues with substitutions at the anomeric, C2-, C5-, and/or C6-positions provides an increase in potency, efficacy, an/or or stability.

[0020] In certain embodiments, conjugation of antisense compounds herein results in increased delivery, uptake and activity in hepatocytes. Thus, more compound is delivered to liver tissue.

[0021] In certain embodiments, a conjugated oligomeric compound has a structure selected from among the following:

[chemical structure]

[0022] The present disclosure provides the following non-limiting numbered embodiments:

### Embodiment 1

[0023] A composition for non-parental administration comprising:

[0024] a conjugated oligomeric compound; and

[0025] an excipient.

### Embodiment 2

[0026] The composition of embodiment 1, wherein the conjugate group comprises from 1 to 3 moieties having Formula I:

[chemical structure]

wherein independently for each moiety having formula I:

[0027] R₁ is selected from Q₁, CH₂Q₁, CH₂OH, CH₂NJ₁J₂, CH₂N₃ and CH₂SJ₃;

[0028] Q₁ is selected from aryl, substituted aryl, heterocyclic, substituted heterocyclic, heteroaryl and substituted heteroaryl;

[0029] R₂ is selected from N₃, CN, halogen, N(H)C(═O)-Q₂, substituted thiol, aryl, substituted aryl, heterocyclic, substituted heterocyclic, heteroaryl and substituted heteroaryl;

[0030] Q₂ is selected from H, C₁-C₆ alkyl, substituted C₁-C₆ alkyl, C₁-C₆ alkoxy, substituted C₁-C₆ alkoxy, aryl, substituted aryl, heterocyclic, substituted heterocyclic, heteroaryl and substituted heteroaryl;

[0031] Y is selected from O, S, CJ₄J₅, NJ₆ and N(J₆)C(═O);

[0032] J₁, J₂, J₃, J₄, J₅, and J₆ are each, independently, H or a substituent group; and

[0033] each substituent group is, independently, mono or poly substituted with optionally protected substituent groups independently selected from halogen, C₁-C₆ alkyl, C₁-C₆ alkoxy, aryl, heterocyclic and heteroaryl wherein each substituent group can include a linear or branched alkylene group optionally including one or more groups independently selected from O, S, NH and C(═O), and wherein each substituent group may be further substituted with one or more groups independently selected from C₁-C₆ alkyl, halogen or C₁-C₆ alkoxy wherein each cyclic group is mono or polycyclic.

### Embodiment 3

[0034] The composition of embodiment 2, comprising one moiety having Formula I that is linked to the oligomeric compound through a connecting group.

### Embodiment 4

[0035] The composition of embodiment 2 comprising 2 or 3 moieties of formula 1 that are linked to the oligomeric compound through a connecting group that comprises a branching group.

### Embodiment 5

[0036] The composition of any of embodiments 2 to 4, wherein each R₁ is, independently, selected from Q₁ and CH₂Q₁.

### Embodiment 6

[0037] The composition of any of embodiments 2 to 4, wherein each Q₁ is substituted heteroaryl.

### Embodiment 7

[0038] The composition of embodiment 6, wherein each Q₁ is selected from among:

[chemical structure]

wherein:

[0039] E is a single bond or one of said linear or branched alkylene groups; and

[0040] X is H or one of said substituent groups.

### Embodiment 8

[0041] The composition of embodiment 7, wherein each X is selected from substituted aryl and substituted heteroaryl.

### Embodiment 9

[0042] The composition of embodiment 8, wherein each X is phenyl or substituted phenyl comprising one or more substituent groups selected from F, Cl, Br, CO₂Et, OCH₃, CN, CH₃, OCH₃, CF₃, N(CH₃)₂ and O-phenyl.

### Embodiment 10

[0043] The composition of embodiment 7, wherein each Q₁ has the formula:

[chemical structure]

wherein:

[0044] -E-X is selected from among:

[chemical structure]

### Embodiment 11

[0045] The composition of embodiment 7, wherein each Q₁ has the formula:

[chemical structure]

wherein:

[0046] -E-X is selected from among:

[chemical structure]

### Embodiment 12

[0047] The composition of any of embodiments 2 to 4, wherein each R₁ is selected from CH₂OH, CH₂NJ₁J₂, CH₂N₃ and CH₂SJ₃ wherein J₁, J₂ and J₃ are each independently selected from H and CH₃.

### Embodiment 13

[0048] The composition of embodiment 12, wherein each R₁ is CH₂OH.

### Embodiment 14

[0049] The composition of embodiment 12, wherein each J₁, J₂ and J₃ are each H.

### Embodiment 15

[0050] The composition of embodiment 12, wherein each J₁, J₂ and J₃ are each CH₃.

### Embodiment 16

[0051] The composition of any of embodiments 2 to 15, wherein each R₂ is N(H)C(═O)-Q₂.

### Embodiment 17

[0052] The composition of embodiment 16, wherein each Q₂ is selected from C₁-C₆ alkyl, substituted C₁-C₆ alkyl, C₁-C₆ alkoxy and substituted C₁-C₆ alkoxy.

### Embodiment 18

[0053] The composition of embodiment 17, wherein each Q₂ is selected from CH₃, CH₂CH₃, CH(CH₃)₂, (CH₂)₂CH₃, C(CH₃)₃, CCl₃, CF₃, O—C(CH₃)₃, CH₂CO₂H, CH₂NH₂ and CH₂CF₃.

### Embodiment 19

[0054] The composition of embodiment 18, wherein each Q₂ is CH₃.

### Embodiment 20

[0055] The composition of embodiments 16, wherein each Q₂ is selected from aryl, substituted aryl, heterocyclic, substituted heterocyclic, heteroaryl and substituted heteroaryl.

### Embodiment 21

[0056] The composition of embodiment 20, wherein each Q₂ is selected from aryl, substituted aryl, heteroaryl and substituted heteroaryl.

### Embodiment 22

[0057] The composition of embodiment 21, wherein each Q₂ is selected is selected from among:

[chemical structure]

### Embodiment 23

[0058] The composition of any of embodiments 2 to 15, wherein each R₂ is selected from aryl, substituted aryl, heterocyclic, substituted heterocyclic, heteroaryl and substituted heteroaryl.

### Embodiment 24

[0059] The composition of embodiment 23, wherein each R₂ has the formula:

[chemical structure]

wherein:

[0060] E is a single bond or one of said linear or branched alkylene groups; and

[0061] X is H or one of said substituent groups.

### Embodiment 25

[0062] The composition of embodiment 24, wherein each -E-X is selected from CH₂OH, CH₂NH₂, CH₂N(H)CH₃, CH₂N(CH₃)₂, CO₂H and CH₂NHCOCH₃.

### Embodiment 26

[0063] The composition of embodiment 24, wherein each -E-X is selected from among:

[chemical structure]

[chemical structure]

### Embodiment 27

[0064] The composition of any of embodiments 2 to 15, wherein each R₂ is selected from N₃, CN, I and SCH₃.

### Embodiment 28

[0065] The composition of embodiment 27, wherein R₂ is I.

### Embodiment 29

[0066] The composition of any of embodiments 2 to 28, wherein each Y is O.

### Embodiment 30

[0067] The composition of any of embodiments 2 to 28, wherein each Y is S.

### Embodiment 31

[0068] The composition of any of embodiments 2 to 28, wherein each Y is CJ₄J₅.

### Embodiment 32

[0069] The composition of any of embodiments 2 to 28, wherein each Y is CH₂.

### Embodiment 33

[0070] The composition of any of embodiments 2 to 28, wherein each Y is NJ₆.

### Embodiment 34

[0071] The composition of any of embodiments 2 to 28, wherein each Y is NH.

### Embodiment 35

[0072] The composition of any of embodiments 2 to 28, wherein each Y is N(CH₃).

### Embodiment 36

[0073] The composition of any of embodiments 2 to 28, wherein each Y is N(J₆)C(═O).

### Embodiment 37

[0074] The composition of any of embodiments 2 to 28, wherein each Y is N(H)C(═O).

### Embodiment 38

[0075] The composition of any of embodiments 2 to 28, wherein each Y is N(CH₃)C(═O).

### Embodiment 39

[0076] The composition of any of embodiments 2 to 38, wherein each moiety of Formula I has the configuration:

[chemical structure]

### Embodiment 40

[0077] The composition of any of embodiments 2 to 38, wherein each moiety of Formula I has the configuration:

[chemical structure]

### Embodiment 41

[0078] The composition of any of embodiments 2-40, wherein when Y is O and R₁ is CH₂OH then R₂ is other than OH, NH₂, and N(H)C(═O)CH₃.

### Embodiment 42

[0079] The composition of any of embodiments 1 to 41, wherein the oligomeric compound comprises at least one modified nucleoside.

### Embodiment 43

[0080] The composition of embodiment 42, wherein the at least one modified nucleoside comprises a modified base.

### Embodiment 44

[0081] The composition of embodiment 42 or 43, wherein the at least one modified nucleoside comprises at least one modified sugar moiety.

### Embodiment 45

[0082] The composition of embodiment 44, wherein at least one modified sugar moiety is a sugar surrogate.

### Embodiment 46

[0083] The composition of embodiment 45, wherein the sugar surrogate is a tetrahydropyran.

### Embodiment 47

[0084] The composition of any of embodiment 46, wherein the tetrahydropyran is F-HNA.

### Embodiment 48

[0085] The composition of embodiment 45, wherein the sugar surrogate is a morpholino.

### Embodiment 49

[0086] The composition of embodiment 1-48 wherein the oligomeric compound comprises at least one modified nucleoside comprising a modified sugar moiety selected from a bicyclic nucleoside and a 2′-modified nucleoside.

### Embodiment 50

[0087] The composition of embodiment 49, wherein the oligomeric compound comprises at least one bicyclic nucleoside.

### Embodiment 51

[0088] The composition of embodiment 50, wherein the bicyclic nucleoside is a (4′-CH₂—O-2′) BNA nucleoside.

### Embodiment 52

[0089] The composition of embodiment 50, wherein the bicyclic nucleoside is a (4′-(CH₂)₂—O-2′) BNA nucleoside.

### Embodiment 53

[0090] The composition of embodiment 50, wherein the bicyclic nucleoside is a (4′-C(CH₃)H—O-2′) BNA nucleoside.

### Embodiment 54

[0091] The composition of embodiment 49-53, wherein the oligomeric compound comprises at least one 2′-modified nucleoside.

### Embodiment 55

[0092] The composition of embodiment 54, wherein the oligomeric compound comprises at least one 2′-modified nucleoside selected from a 2′-F nucleoside, a 2′-OCH₃ nucleoside, and a 2′-O(CH₂)₂OCH₃ nucleoside.

### Embodiment 56

[0093] The composition of embodiment 54, wherein at least one 2′-modified nucleoside is a 2′-F nucleoside.

### Embodiment 57

[0094] The composition of embodiment 54, wherein at least one 2′-modified nucleoside is a 2′-OCH₃ nucleoside.

### Embodiment 58

[0095] The composition of embodiment 54, wherein at least one 2′-modified nucleoside is a 2′-O(CH₂)₂OCH₃ nucleoside.

### Embodiment 59

[0096] The composition of any of embodiments 1 to 58, wherein the oligomeric compound comprises at least one unmodified nucleoside.

### Embodiment 60

[0097] The composition of embodiment 59, wherein the at least one unmodified nucleoside is a ribonucleoside.

### Embodiment 61

[0098] The composition of embodiment 59, wherein the at least one unmodified nucleoside is a deoxyribonucleoside.

### Embodiment 62

[0099] The composition of any of embodiments 1 to 61, wherein the oligomeric compound comprises at least two modified nucleosides.

### Embodiment 63

[0100] The composition of embodiment 62, wherein the at least two modified nucleosides comprise the same modification.

### Embodiment 64

[0101] The composition of embodiment 62, wherein the at least two modified nucleosides comprise different modifications.

### Embodiment 65

[0102] The composition of any of embodiments 61 to 64, wherein at least one of the at least two modified nucleosides comprises a 2′-modification.

### Embodiment 66

[0103] The composition of embodiment 65, wherein each of the at least two modified nucleosides is independently selected from 2′-F nucleosides, 2′-OCH₃ nucleosides and 2′-O(CH₂)₂OCH₃ nucleosides.

### Embodiment 67

[0104] The composition of embodiment 66, wherein each of the at least two modified nucleosides is a 2′-F nucleoside.

### Embodiment 68

[0105] The composition of embodiment 66, wherein each of the at least two modified nucleosides is a 2′-OCH₃ nucleosides.

### Embodiment 69

[0106] The composition of embodiment 66, wherein each of the at least two modified nucleosides is a 2′-O(CH₂)₂OCH₃ nucleoside.

### Embodiment 70

[0107] The composition of any of embodiments 1 to 69, wherein essentially every nucleoside of the oligomeric compound is a modified nucleoside.

### Embodiment 71

[0108] The composition of any of embodiments 1 to 57 an 61 to 70, wherein every nucleoside of the oligomeric compound is a modified nucleoside.

### Embodiment 72

[0109] The composition of any of embodiments 1 to 71, wherein the oligomeric compound is single-stranded.

### Embodiment 73

[0110] The composition of any of embodiments 1 to 71, wherein the oligomeric compound is double-stranded.

### Embodiment 74

[0111] The composition of any of embodiments 1 to 71, wherein the oligomeric compound is an antisense compound.

### Embodiment 75

[0112] The composition of any of embodiments 1 to 71, wherein the oligomeric compound is a RISC based oligomeric compound.

### Embodiment 76

[0113] The composition of any of embodiments 1 to 71, wherein the oligomeric compound is an siRNA duplex and the conjugate group is attached to the sense strand of the siRNA.

### Embodiment 77

[0114] The composition of any of embodiments 1 to 71, wherein the oligomeric compound is an RNase H based antisense compound.

### Embodiment 78

[0115] The composition of any of embodiments 1 to 77, wherein the conjugate group is attached to the 5′-terminal nucleoside of the oligomeric compound.

### Embodiment 79

[0116] The composition of any of embodiments 1 to 77, wherein the conjugate group is attached to the 3′-terminal nucleoside of the oligomeric compound.

### Embodiment 80

[0117] The composition of any of embodiments 1 to 77, wherein the conjugate group is attached to an internal nucleoside of the oligomeric compound.

### Embodiment 81

[0118] The composition of any of embodiments 1 to 77, wherein the conjugate group increases uptake of the oligomeric compound into a hepatocyte relative to an unconjugated oligomeric compound.

### Embodiment 82

[0119] The composition of any of embodiments 1 to 77, wherein the conjugate group increases the affinity of the oligomeric compound for a liver cell relative to an unconjugated oligomeric compound.

### Embodiment 83

[0120] The composition of any of embodiments 1 to 77, wherein the conjugate group increases accumulation of the oligomeric compound in the liver relative to an unconjugated oligomeric compound.

### Embodiment 84

[0121] The composition of any of embodiments 1 to 77, wherein the conjugate group decreases accumulation of the oligomeric compound in the kidneys relative to an unconjugated oligomeric compound.

### Embodiment 85

[0122] The composition of embodiment 1 to 69 or 72 to 84, wherein the oligomeric compound has a sugar motif comprising:

[0123] a 5′-region consisting of 2-8 linked 5′-region nucleosides, wherein at least two 5′-region nucleosides are modified nucleosides and wherein the 3′-most 5′-region nucleoside is a modified nucleoside;

[0124] a 3′-region consisting of 2-8 linked 3′-region nucleosides, wherein at least two 3′-region nucleosides are modified nucleosides and wherein the 5′-most 3′-region nucleoside is a modified nucleoside; and

[0125] a central region between the 5′-region and the 3′-region consisting of 5-10 linked central region nucleosides, each independently selected from among: a modified nucleoside and an unmodified deoxynucleoside, wherein the 5′-most central region nucleoside is an unmodified deoxynucleoside and the 3′-most central region nucleoside is an unmodified deoxynucleoside.

### Embodiment 86

[0126] The composition of embodiment 85, wherein the 5′-region consists of 2 linked 5′-region nucleosides.

### Embodiment 87

[0127] The composition of embodiment 85, wherein the 5′-region consists of 3 linked 5′-region nucleosides.

### Embodiment 88

[0128] The composition of embodiment 85, wherein the 5′-region consists of 4 linked 5′-region nucleosides.

### Embodiment 89

[0129] The composition of embodiment 85, wherein the 5′-region consists of 5 linked 5′-region nucleosides.

### Embodiment 90

[0130] The composition of any of embodiments 85 to 89, wherein the 3′-region consists of 2 linked 3′-region nucleosides.

### Embodiment 91

[0131] The composition of any of embodiments 85 to 89, wherein the 3′-region consists of 3 linked 3′-region nucleosides.

### Embodiment 92

[0132] The composition of any of embodiments 85 to 89, wherein the 3′-region consists of 4 linked 3′-region nucleosides.

### Embodiment 93

[0133] The composition of any of embodiments 85 to 89, wherein the 3′-region consists of 5 linked 3′-region nucleosides.

### Embodiment 94

[0134] The composition of any of embodiments 85 to 93, wherein the central region consists of 5 linked central region nucleosides.

### Embodiment 95

[0135] The composition of any of embodiments 85 to 93, wherein the central region consists of 6 linked central region nucleosides.

### Embodiment 96

[0136] The composition of any of embodiments 85 to 93, wherein the central region consists of 7 linked central region nucleosides.

### Embodiment 97

[0137] The composition of any of embodiments 85 to 93, wherein the central region consists of 8 linked central region nucleosides.

### Embodiment 98

[0138] The composition of any of embodiments 85 to 93, wherein the central region consists of 9 linked central region nucleosides.

### Embodiment 99

[0139] The composition of any of embodiments 85 to 93, wherein the central region consists of 10 linked central region nucleosides.

### Embodiment 100

[0140] The composition of any of embodiments 85 to 99, wherein the oligomeric compound consists of 14 to 26 linked nucleosides.

### Embodiment 101

[0141] The composition of any of embodiments 85 to 99, wherein the oligomeric compound consists of 15 to 25 linked nucleosides.

### Embodiment 102

[0142] The composition of any of embodiments 85 to 99, wherein the oligomeric compound consists of 16 to 20 linked nucleosides.

### Embodiment 103

[0143] The composition of any of embodiments 85 to 102, wherein each modified nucleoside independently comprises a 2′-substituted sugar moiety or a bicyclic sugar moiety.

### Embodiment 104

[0144] The composition of embodiment 103, wherein at least one modified nucleoside of the oligomeric compound comprises a 2′-substituted sugar moiety.

### Embodiment 105

[0145] The composition of embodiment 104, wherein each modified nucleoside comprising a 2′-substituted sugar moiety comprises a 2′ substituent independently selected from among: halogen, optionally substituted allyl, optionally substituted amino, azido, optionally substituted SH, CN, OCN, CF₃, OCF₃, O, S, or N(Rₘ)-alkyl; O, S, or N(Rₘ)-alkenyl; O, S or N(Rₘ)-alkynyl; optionally substituted O-alkylenyl-O-alkyl, optionally substituted alkynyl, optionally substituted alkaryl, optionally substituted aralkyl, optionally substituted O-alkaryl, optionally substituted O-aralkyl, O(CH₂)₂SCH₃, O—(CH₂)₂—O—N(Rₘ)(Rₙ) or O—CH₂—C(═O)—N(Rₘ)(Rₙ), where each Rₘ and Rₙ is, independently, H, an amino protecting group or substituted or unsubstituted C₁-C₁₀ alkyl;

wherein each optionally substituted group is optionally substituted with a substituent group independently selected from among: hydroxyl, amino, alkoxy, carboxy, benzyl, phenyl, nitro (NO₂), thiol, thioalkoxy (S-alkyl), halogen, alkyl, aryl, alkenyl and alkynyl.

### Embodiment 106

[0146] The composition of embodiment 104, wherein each 2′ substituent is independently selected from among: a halogen, OCH₃, OCH₂F, OCHF₂, OCF₃, OCH₂CH₃, O(CH₂)₂F, OCH₂CHF₂, OCH₂CF₃, OCH₂—CH═CH₂, O(CH₂)₂—OCH₃, O(CH₂)₂—SCH₃, O(CH₂)₂—OCF₃, O(CH₂)₃—N(R₃)(R₄), O(CH₂)₂—ON(R₃)(R₄), O(CH₂)₂—O(CH₂)₂—N(R₃)(R₄), OCH₂C(═O)—N(R₃)(R₄), OCH₂C(═O)—N(R₅)—(CH₂)₂—N(R₃)(R₄), and O(CH₂)₂—N(R₅)—C(═NR₆)[N(R₃)(R₄)]; wherein R₃, R₄, R₅ and R₆ are each, independently, H or C₁-C₆ alkyl.

### Embodiment 107

[0147] The composition of embodiment 104, wherein each 2′ substituent is independently selected from among: a halogen, OCH₃, OCF₃, OCH₂CH₃, OCH₂CF₃, OCH₂—CH═CH₂, O(CH₂)₂—OCH₃ (MOE), O(CH₂)₂—O(CH₂)₂—N(CH₃)₂, OCH₂C(═O)—N(H)CH₃, OCH₂C(═O)—N(H)—(CH₂)₂—N(CH₃)₂, and OCH₂—N(H)—C(═NH)NH₂.

### Embodiment 108

[0148] The composition of embodiment 104, wherein the at least one 2′-modified nucleoside comprises a 2′-MOE sugar moiety.

### Embodiment 109

[0149] The composition of embodiment 104, wherein the at least one 2′-modified nucleoside comprises a 2′-OMe sugar moiety.

### Embodiment 110

[0150] The composition of embodiment 104, wherein the at least one 2′-modified nucleoside comprises a 2′-F sugar moiety.

### Embodiment 111

[0151] The composition of any of embodiments 85 to 110, wherein the oligomeric compound comprises at least one modified nucleoside comprising a sugar surrogate.

### Embodiment 112

[0152] The composition of embodiment 111, wherein the modified nucleoside comprises an F-HNA sugar moiety.

### Embodiment 113

[0153] The composition of embodiment 111, wherein the modified nucleoside comprises an HNA sugar moiety.

### Embodiment 114

[0154] The composition of embodiment 111, wherein the modified nucleoside comprises a morpholino.

### Embodiment 115

[0155] The composition of any of embodiments 85 to 114 wherein the oligomeric compound comprises at least one modified nucleoside comprising a bicyclic sugar moiety.

### Embodiment 116

[0156] The composition of embodiment 115, wherein the bicyclic sugar moiety is a cEt sugar moiety.

### Embodiment 117

[0157] The composition of embodiment 115, wherein bicyclic sugar moiety is an LNA sugar moiety.

### Embodiment 118

[0158] The composition of any of embodiments 1 to 117, wherein the oligomeric compound comprises at least one modified internucleoside linkage.

### Embodiment 119

[0159] The composition of any of embodiments 1 to 117, wherein each internucleoside linkage of the oligomeric compound is a modified internucleoside linkage.

### Embodiment 120

[0160] The composition of any of embodiments 1 to 118, wherein the oligomeric compound comprises at least one unmodified phosphodiester internucleoside linkage.

### Embodiment 121

[0161] The composition of any of embodiments 118 to 120, wherein at least one modified internucleoside linkage is a phosphosphorothioate internucleoside linkage.

### Embodiment 122

[0162] The composition of any of embodiments 119 to 121, wherein each modified internucleoside linkage is a phosphorothioate internucleoside linkage.

### Embodiment 123

[0163] The composition of any of embodiments 118 and 120 to 122, wherein the oligomeric compound comprises at least 2 phosphodiester internucleoside linkages.

### Embodiment 124

[0164] The composition of any of embodiments 118 and 120 to 122, wherein the oligomeric compound comprises at least 3 phosphodiester internucleoside linkages.

### Embodiment 125

[0165] The composition of any of embodiments 118 and 120 to 122, wherein the oligomeric compound comprises at least 4 phosphodiester internucleoside linkages.

### Embodiment 126

[0166] The composition of any of embodiments 118 and 120 to 122, wherein the oligomeric compound comprises at least 5 phosphodiester internucleoside linkages.

### Embodiment 127

[0167] The composition of any of embodiments 118 and 120 to 122, wherein the oligomeric compound comprises at least 6 phosphodiester internucleoside linkages.

### Embodiment 128

[0168] The composition of any of embodiments 118 and 120 to 122, wherein the oligomeric compound comprises at least 7 phosphodiester internucleoside linkages.

### Embodiment 129

[0169] The composition of any of embodiments 118 and 120 to 122, wherein the oligomeric compound comprises at least 8 phosphodiester internucleoside linkages.

### Embodiment 130

[0170] The composition of any of embodiments 118 and 120 to 122, wherein the oligomeric compound comprises at least 9 phosphodiester internucleoside linkages.

### Embodiment 131

[0171] The composition of any of embodiments 118 and 120 to 122, wherein the oligomeric compound comprises at least 10 phosphodiester internucleoside linkages.

### Embodiment 132

[0172] The composition of any of embodiments 118 and 120 to 131, wherein the oligomeric compound comprises fewer than 16 phosphorothioate internucleoside linkages.

### Embodiment 133

[0173] The composition of any of embodiments 118 and 120 to 131, wherein the oligomeric compound comprises fewer than 15 phosphorothioate internucleoside linkages.

### Embodiment 134

[0174] The composition of any of embodiments 118 and 120 to 131, wherein the oligomeric compound comprises fewer than 14 phosphorothioate internucleoside linkages.

### Embodiment 135

[0175] The composition of any of embodiments 118 and 120 to 131, wherein the oligomeric compound comprises fewer than 13 phosphorothioate internucleoside linkages.

### Embodiment 136

[0176] The composition of any of embodiments 118 and 120 to 131, wherein the oligomeric compound comprises fewer than 12 phosphorothioate internucleoside linkages.

### Embodiment 137

[0177] The composition of any of embodiments 118 and 120 to 131, wherein the oligomeric compound comprises fewer than 11 phosphorothioate internucleoside linkages.

### Embodiment 138

[0178] The composition of any of embodiments 118 and 120 to 131, wherein the oligomeric compound comprises fewer than 10 phosphorothioate internucleoside linkages.

### Embodiment 139

[0179] The composition of any of embodiments 118 and 120 to 131, wherein the oligomeric compound comprises fewer than 9 phosphorothioate internucleoside linkages.

### Embodiment 140

[0180] The composition of any of embodiments 118 and 120 to 131, wherein the oligomeric compound comprises fewer than 8 phosphorothioate internucleoside linkages.

### Embodiment 141

[0181] The composition of any of embodiments 118 and 120 to 131, wherein the oligomeric compound comprises fewer than 7 phosphorothioate internucleoside linkages.

### Embodiment 142

[0182] The composition of any of embodiments 118 and 120 to 131, wherein the oligomeric compound comprises fewer than 6 phosphorothioate internucleoside linkages.

### Embodiment 143

[0183] The composition of any of embodiments 1 to 142, wherein each terminal internucleoside linkage of the oligomeric compound is a phosphorothioate internucleoside linkage.

### Embodiment 144

[0184] The composition of any of embodiments 1 to 129 or 132 to 143, wherein each internucleoside linkage linking two deoxynucleosides of the oligomeric compound is a phosphorothioate internucleoside linkage.

### Embodiment 145

[0185] The composition of any of embodiments 1 to 129 or 132 to 143, wherein each non-terminal internucleoside linkage linking two modified nucleosides of the oligomeric compound is a phosphodiester internucleoside linkage.

### Embodiment 146

[0186] The composition of any of embodiments 1 to 129 or 132 to 145, wherein each non-terminal internucleoside linkage of the oligomeric compound that is 3′ of a modified nucleoside is a phosphodiester internucleoside linkage.

### Embodiment 147

[0187] The composition of any of embodiments 1 to 129 or 132 to 146, wherein each internucleoside linkage of the oligomeric compound that is 3′ of a deoxynucleoside is a phosphorothioate internucleoside linkage.

### Embodiment 148

[0188] The composition of any of embodiments 1 to 129 or 132 to 147, wherein the oligomeric compound has a chemical motif selected from among:

### MsMy(Ds)0-1(DsDs)(3-5)MsM

### MsMy(Ds)0-1(DsDs)(3-5)MyMsM

### MsMy(Ds)0-1(DsDs)(3-5)MyMyMsM

### MsMy(Ds)0-1(DsDs)(3-5)MyMyMyMsM

### MsMyMy(Ds)0-1(DsDs)(3-5)MsM

### MsMyMy(Ds)0-1(DsDs)(3-5)MyMsM

### MsMyMy(Ds)0-1(DsDs)(3-5)MyMyMsM

### MsMyMy(Ds)0-1(DsDs)(3-5)MyMyMyMsM

### MsMyMyMy(Ds)0-1(DsDs)(3-5)MsM

### MsMyMyMy(Ds)0-1(DsDs)(3-5)MyMsM

### MsMyMyMy(Ds)0-1(DsDs)(3-5)MyMyMsM

### MsMyMyMy(Ds)0-1(DsDs)(3-5)MyMyMyMsM

### MsMyMyMyMy(Ds)0-1(DsDs)(3-5)MsM

### MsMyMyMyMy(Ds)0-1(DsDs)(3-5)MyMsM

### MsMyMyMyMy(Ds)0-1(DsDs)(3-5)MyMyMsM; and

### MsMyMyMyMy(Ds)0-1(DsDs)(3-5)MyMyMyMsM;

[0189] wherein each M is independently a modified nucleoside, each D is a deoxynucleoside; each s is a phosphorothioate internucleoside linkage, and each y is either a phosphodiester internucleoside linkage or a phosphoro-thioate internucleoside linkage, provided that at least one y is a phosphodiester internucleotide linkage.

### Embodiment 149

[0190] The composition of any of embodiments 1 to 129 or 132 to 147, wherein the oligomers has a chemical motif selected from among:

### MsMo(Ds)0-1(DsDs)(3-5)MoMsM

### MsMo(Ds)0-1(DsDs)(3-5)MoMoMsM

### MsMo(Ds)0-1(DsDs)(3-5)MoMoMoMsM

### MsMoMo(Ds)0-1(DsDs)(3-5)MsM

### MsMoMo(Ds)0-1(DsDs)(3-5)MoMsM

### MsMoMo(Ds)0-1(DsDs)(3-5)MoMoMsM

### MsMoMo(Ds)0-1(DsDs)(3-5)MoMoMoMsM

### MsMoMoMo(Ds)0-1(DsDs)(3-5)MsM

### MsMoMoMo(Ds)0-1(DsDs)(3-5)MoMsM

### MsMoMoMo(Ds)0-1(DsDs)(3-5)MoMoMsM

### MsMoMoMo(Ds)0-1(DsDs)(3-5)MoMoMoMsM

### MsMoMoMoMo(Ds)0-1(DsDs)(3-5)MsM

### MsMoMoMoMo(Ds)0-1(DsDs)(3-5)MoMsM

### MsMoMoMoMo(Ds)0-1(DsDs)(3-5)MoMoMsM; and

### MsMoMoMoMo(Ds)0-1(DsDs)(3-5)MoMoMoMsM;

[0191] wherein each M is independently a modified nucleoside, each D is a deoxynucleoside; each o is a phosphodiester internucleoside linkage, and each s is a phosphoro-thioate internucleoside linkage.

### Embodiment 150

[0192] The composition of embodiment 148 or 149, wherein each M is independently selected from among a 2′ substituted sugar moiety or a bicyclic nucleoside.

### Embodiment 151

[0193] The composition of embodiment 150 wherein each M is independently selected from among: a 2′-MOE nucleoside and a bicyclic nucleoside.

### Embodiment 152

[0194] The composition of embodiment 150 or 151, wherein each M is a 2′-MOE nucleoside.

### Embodiment 153

[0195] The composition of embodiment 150 or 151, wherein each M is a cEt nucleoside.

### Embodiment 154

[0196] The composition of embodiments 150 or 151, wherein each M is an LNA nucleoside.

### Embodiment 155

[0197] The composition of any of embodiments 1 to 154, wherein the excipient is an excipient for oral administration that improves the oral delivery the composition.

### Embodiment 156

[0198] The composition of any of embodiments 1 to 155, wherein the excipient comprises at least one penetration enhancer.

### Embodiment 157

[0199] The composition of embodiment 156 wherein the penetration enhancer is selected from a fatty acid, bile acid, chelating agent and non-chelating non-surfactant.

### Embodiment 158

[0200] The composition of embodiment 157 wherein the fatty acid is selected from arachidonic acid, oleic acid, lauric acid, capric acid, caprylic acid, myristic acid, palmitic acid, stearic acid, linoleic acid, linolenic acid, dicaprate, tricaprate, monoolein, dilaurin, glyceryl 1-monocaprate, 1-dodecylazacycloheptan-2-one, an acylcarnitine, an acylcholine and a monoglyceride or a pharmaceutically acceptable salt thereof.

### Embodiment 159

[0201] The composition of embodiment 157 wherein the bile acid is selected from cholic acid, dehydrocholic acid, deoxycholic acid, glucholic acid, glycholic acid, glycodeoxycholic acid, taurocholic acid, taurodeoxycholic acid, chenodeoxycholic acid, ursodeoxycholic acid, sodium tauro-24, 25-dihydrof&sidate, sodium glycodihydrofusidate and polyoxyethylene-9-lauryl ether or a pharmaceutically acceptable salt thereof.

### Embodiment 160

[0202] The composition of embodiment 157 wherein the chelating agent is selected from EDTA, citric acid, a salicylate, an N-acyl derivative of collagen, laureth-9 and an N-amino acyl derivative of a beta-diketone or a mixture thereof.

### Embodiment 161

[0203] The composition of embodiment 157 wherein the non-chelating non-surfactant is selected from the group consisting of an unsaturated cyclic urea, 1-alkyl-alkanone, 1-alkenylazacycloalkanone a steroid anti-inflammatory agent or a mixture thereof.

### Embodiment 162

[0204] The composition of embodiment 156 wherein the penetration enhancer comprises sodium caprate (C10) and/or sodium caprylate (C12).

### Embodiment 163

[0205] The composition of any of embodiments 1 to 162 wherein the composition is a capsule, tablet, compression coated tablet or bilayer tablet.

### Embodiment 164

[0206] The composition of embodiment 164 wherein the capsule, tablet, compression coated tablet or bilayer tablet comprises an enteric coating.

### Embodiment 165

[0207] The composition of any of embodiments 1 to 164 wherein the composition comprises an enteric coating.

166. The composition of any of embodiments 1 to 165 wherein the excipient comprises a substance selected from poly-amino acids, polyimines, polyacrylates, polyalkylacrylates, polyoxethanes, polyalkylcyanoacrylatc, cationized gelatins, albumins, starches, acrylates, polyethylene glycol, DEAE-derivatized polyimines, pollulans and celluloses.

### Embodiment 167

[0208] The composition of any of embodiments 1 to 166 wherein the excipient comprises a substance selected from chitosan, poly-L-lysine, polyhistidine, polyornithine, polyspermines, protamine, polyvinylpyridine, polythiodiethylamino-methylene P(TDAE), polyaminostyrene, poly(methylcyanoacrylate), poly(ethylcyanoacrylate), poly(butylcyanoacrylate), poly(isobutylcyanoacrylate), poly(isohexylcyanoacrylatc), DEAE-methacrylate, DEAE-ethylhexylacrylate, DEAE-acrylamide, DEAE-albumin, DEAE-dextran, polymethylacrylate, polyhexylacrylate, poly (D,L-lactic acid), poly (D,L-lactic-coglycolic acid) (PLGA) and polyethylene glycol (PEG).

### Embodiment 168

[0209] The composition of any of embodiments 1 to 167 wherein the excipient comprises a substance selected from a complex of poty-L-lysine and alginate, a complex of protamine and alginate, lysine, dilysine, trilysine, calcium, glucosamine, arginine, galactosamine, nicotinamide, creatine, lysine-ethyl ester or arginine ethyl-ester.

### Embodiment 169

[0210] The composition of any of embodiments 1 to 169 wherein the excipient comprises a substance selected from a delayed release coating or matrix selected from acetate phthalate, propylene glycol, sorbitan monoleate, cellulose acetate phthalate (CAP), cellulose acetate trimellitate, hydroxypropyl methyl cellulose phthalate (HPMCP), methacrylates, chitosan, guar gum and polyethylene glycol (PEG).

### Embodiment 170

[0211] The composition of any of embodiments 1 to 169 wherein the excipient comprises a mucoadhesive patch.

### Embodiment 171

[0212] The composition of any of embodiments 1 to 170, wherein the oligomeric compound has a nucleobase sequence comprising an at least 8 nucleobase portion complementary to an equal length portion of a target nucleic acid.

### Embodiment 172

[0213] The composition of any of embodiments 1 to 170, wherein the oligomeric compound has a nucleobase sequence comprising an at least 10 nucleobase portion complementary to an equal length portion of a target nucleic acid.

### Embodiment 173

[0214] The composition of any of embodiments 1 to 170, wherein the oligomeric compound has a nucleobase sequence comprising an at least 12 nucleobase portion complementary to an equal length portion of a target nucleic acid.

### Embodiment 174

[0215] The composition of any of embodiments 1 to 170, wherein the oligomeric compound has a nucleobase sequence comprising an at least 14 nucleobase portion complementary to an equal length portion of a target nucleic acid.

### Embodiment 175

[0216] The composition of any of embodiments 1 to 170, wherein the oligomeric compound has a nucleobase sequence comprising an at least 16 nucleobase portion complementary to an equal length portion of a target nucleic acid.

### Embodiment 176

[0217] The composition of any of embodiments 1 to 170, wherein the oligomeric compound has a nucleobase sequence comprising an at least 18 nucleobase portion complementary to an equal length portion of a target nucleic acid.

### Embodiment 177

[0218] The composition of any of embodiments 1 to 170, wherein the oligomeric compound is at least 90% complementary to a target nucleic acid.

### Embodiment 178

[0219] The composition of any of embodiments 1 to 170, wherein the oligomeric compound is at least 95% complementary to a target nucleic acid.

### Embodiment 179

[0220] The composition of any of embodiments 1 to 170, wherein the oligomeric compound is 100% complementary to a target nucleic acid.

### Embodiment 180

[0221] The composition of any of embodiments 171 to 179, wherein the target nucleic acid is a pre-mRNA.

### Embodiment 181

[0222] The composition of any of embodiments 171 to 179, wherein the target nucleic acid is an mRNA.

### Embodiment 182

[0223] The composition of any of embodiments 171 to 179, wherein the target nucleic acid is a micro RNA.

### Embodiment 183

[0224] The composition of any of embodiments 171 to 179, wherein the target nucleic acid is expressed in the liver.

### Embodiment 184

[0225] The composition of any of embodiments 171 to 179, wherein the target nucleic acid is expressed in hepatocytes.

### Embodiment 185

[0226] The composition of any of embodiments 171 to 179, wherein the target nucleic acid has the nucleobase sequence of any one of SEQ ID NOs.: 1, 2, 3, 4, 5, 6, 7, 8, 9, 10, 11, 12, 13, 14, 15, 16, 17, 18, 19, 20, 21, 22, 23, 24, or 82.

### Embodiment 186

[0227] The composition of any of embodiments 169 to 177, wherein the target nucleic encodes a protein selected from among: Alpha 1 antitrypsin, Androgen Receptor, Apolipoprotein (a), Apolipoprotein B, Apolipoprotein C-III, C-Reactive Protein, eIF-4E, Factor VII, Factor XI, Glucocorticoid Receptor, Glucagon Receptor, HBV, Protein Tyrosine Phosphatase 1B, STAT3, SRB-1, Transthyretin, PCSK9, angiopoietin-like 3, plasma prekallikrein, and growth hormone receptor.

### Embodiment 187

[0228] The composition of any of embodiments 171 to 181 wherein the target nucleic acid is a viral nucleic acid.

### Embodiment 188

[0229] The composition of embodiment 187, wherein the viral nucleic acid expressed in the liver.

### Embodiment 189

[0230] The composition of embodiment 186, wherein the target nucleic acid is a Hepatitis B viral nucleic acid.

### Embodiment 190

[0231] The composition of embodiment 186, wherein the target nucleic acid is a HCV viral nucleic acid.

### Embodiment 191

[0232] The composition of any of embodiments 1 to 181, wherein the oligomeric compound comprises the nucleobase sequence of any one of SEQ ID NOs.: 16, 17, 18, 19, 20, 21, 22, 23, 24, 25, 26, 27, 28, 29, 30, 31, 32, 33, 34, 35, 36, 37, 38, 39, 40, 41, 42, 43, 44, 45, 46, 47, 48, 49, 50, 51, 52, 53, 54, 55, 56, 57, 58, 59, 60, 61, 62, 63, 64, 65, 66, 67, 68, 69, 70, 71, 72, 73, 74, 75, 76, 77, 78, 79, 80, 81, 83, 84, 85, 86, 87, 88, 89, 90, 91, 92, 93, 94, 95, 96, 97, 98, 99, 100, 101, 102, 103, 104, 105, 106, 107, 108, 109, 110, 111, 112, 113, 114, 115, 116, 117, 118, 119, 120, 121, 122, 123, 124, 125, 126, 127, 128, 129, 130, 131, 132, 133, 134, 135, 136, 137, 138, 139, 140, 141, 142, 143, 144, 145, or 146.

### Embodiment 192

[0233] The composition of any of embodiments 1 to 181, wherein the oligomeric compound comprises the nucleobase sequence of any one of SEQ ID NO.: 25, 26, 27, 28, 29, or 30.

### Embodiment 193

[0234] The composition of any of embodiments 1 to 181, wherein the oligomeric compound comprises the nucleobase sequence of SEQ ID NO.: 31.

### Embodiment 194

[0235] The composition of any of embodiments 1 to 181, wherein the oligomeric compound comprises the nucleobase sequence of SEQ ID NO.: 32.

### Embodiment 195

[0236] The composition of any of embodiments 1 to 181, wherein the oligomeric compound comprises the nucleobase sequence of SEQ ID NO.: 33.

### Embodiment 196

[0237] The composition of any of embodiments 1 to 181, wherein the oligomeric compound comprises the nucleobase sequence of SEQ ID NO.: 34.

### Embodiment 197

[0238] The composition of any of embodiments 1 to 181, wherein the oligomeric compound comprises the nucleobase sequence of any of SEQ ID NOs.: 35, 36, 37, 38, 39, 40, 41, 42, or 43.

### Embodiment 198

[0239] The composition of any of embodiments 1 to 181, wherein the oligomeric compound comprises the nucleobase sequence of SEQ ID NO.: 44, 45, 46, 47, or 48.

### Embodiment 199

[0240] The composition of any of embodiments 1 to 181, wherein the oligomeric compound comprises the nucleobase sequence of any of SEQ ID NOs.: 49, 50, 51, 52, 53, 54, 55, 56, 57, 58, or 59.

### Embodiment 200

[0241] The composition of any of embodiments 1 to 181, wherein the oligomeric compound comprises the nucleobase sequence of any of SEQ ID NOs.: 60, 61, 62, 63, 64, 65, 66, or 67.

### Embodiment 201

[0242] The composition of any of embodiments 1 to 181, wherein the oligomeric compound comprises the nucleobase sequence of any of SEQ ID NO.: 69, 70, 71, or 72.

### Embodiment 202

[0243] The composition of any of embodiments 1 to 181, wherein the oligomeric compound comprises the nucleobase sequence of SEQ ID NO.: 73.

### Embodiment 203

[0244] The composition of any of embodiments 1 to 181, wherein the oligomeric compound comprises the nucleobase sequence of any of SEQ ID NOs.: 74, 75, 76, 77, 78, 79, 80, or 81.

### Embodiment 204

[0245] The composition of any of embodiments 1 to 181, wherein the oligomeric compound comprises the nucleobase sequence of SEQ ID NO.: 68.

### Embodiment 205

[0246] The composition of any of embodiments 1 to 181, wherein the oligomeric compound comprises the nucleobase sequence of any of SEQ ID NOs.: 82-103, 111, or 113.

### Embodiment 206

[0247] The composition of any of embodiments 1 to 205, wherein the oligomeric compound is an antisense oligomeric compound.

### Embodiment 207

[0248] The composition of any of embodiments 1 to 206, wherein the conjugate group does not comprise PEG.

### Embodiment 208

[0249] The composition of any of embodiments 1 to 206, wherein the connector group does not comprise PEG.

### Embodiment 209

[0250] The composition of any of embodiments 1 to 206, wherein the linking group does not comprise PEG.

### Embodiment 210

[0251] The composition of any of embodiments 1 to 209 for the treatment of a disease or condition.

### Embodiment 211

[0252] A method of administering the composition of any of embodiments 1 to 210, to an animal.

### Embodiment 212

[0253] A method of treating a metabolic disorder comprising administering the composition of any of embodiments 1 to 210, to a subject in need thereof.

### Embodiment 213

[0254] A method of treating a cardiovascular disorder comprising administering the composition of any of embodiments 1 to 210, to a subject in need thereof.

### Embodiment 214

[0255] The method of any of embodiments 211 to 213, wherein the administration is oral.

### Embodiment 215

[0256] The method of any of embodiments 211 to 213, wherein the administration is by enema.

### Embodiment 216

[0257] The method of any of embodiments 2011 to 215, wherein the conjugated oligomeric compound is at least 90% complementary to a target nucleic acid.

### Embodiment 217

[0258] The method of any of embodiments 211 to 215, wherein the conjugated oligomeric compound is 100% complementary to a target nucleic acid.

### Embodiment 218

[0259] The method of any of embodiments 170 to 184, wherein the target nucleic acid is expressed in the liver.

### Embodiment 219

[0260] The method of any of embodiments 170 to 185, wherein the target nucleic acid is expressed in hepatocytes.

### Embodiment 220

[0261] The method of any of embodiments 170 to 186, wherein the target nucleic encodes a protein selected from among: Androgen Receptor, Apolipoprotein (a), Apolipoprotein B, Apolipoprotein C-III, C—Reactive Protein, eIF-4E, Factor VII, Factor XI, Glucocorticoid Receptor, Glucagon Receptor, Protein Tyrosine Phosphatase 1B, STAT3, and Transthyretin.

### Embodiment 221

[0262] A method of modulating splicing of a pre-mRNA target nucleic acid in a cell comprising contacting the cell with a conjugated antisense compound, wherein the conjugated antisense compound comprises a modified oligonucleotide and a conjugate; and wherein the conjugate comprises a GalNac; and thereby modulating splicing of the pre-mRNA target nucleic acid in the cell.

### Embodiment 220

[0263] The method of embodiment 219, wherein the pre-mRNA target nucleic acid is expressed in a hepatocyte.

### Embodiment 221

[0264] A compound comprising an oligomeric compound and a conjugate group, wherein the conjugate group comprises a moiety having Formula I:

[chemical structure]

wherein:

[0265] R₁ is selected from Q₁, CH₂Q₁, CH₂OH, CH₂NJ₁J₂, CH₂N₃ and CH₂SJ₃;

[0266] Q₁ is selected from aryl, substituted aryl, heterocyclic, substituted heterocyclic, heteroaryl and substituted heteroaryl;

[0267] R₂ is selected from N₃, CN, halogen, N(H)C(═O)-Q₂, substituted thiol, aryl, substituted aryl, heterocyclic, substituted heterocyclic, heteroaryl and substituted heteroaryl;

[0268] Q₂ is selected from H, C₁-C₆ alkyl, substituted C₁-C₆ alkyl, C₁-C₆ alkoxy, substituted C₁-C₆ alkoxy, aryl, substituted aryl, heterocyclic, substituted heterocyclic, heteroaryl and substituted heteroaryl;

[0269] Y is selected from O, S, CJ₄J₅, NJ₆ and N(J₆)C(═O);

[0270] J₁, J₂, J₃, J₄, J₅, and J₆ are each, independently, H or a substituent group;

[0271] each substituent group is, independently, mono or poly substituted with optionally protected substituent groups independently selected from halogen, C₁-C₆ alkyl, C₁-C₆ alkoxy, aryl, heterocyclic and heteroaryl wherein each substituent group can include a linear or branched alkylene group optionally including one or more groups independently selected from O, S, NH and C(═O), and wherein each substituent group may be further substituted with one or more groups independently selected from C₁-C₆ alkyl, halogen or C₁-C₆ alkoxy wherein each cyclic group is mono or polycyclic; and

[0272] when Y is O and R₁ is OH then R₂ is other than OH and N(H)C(═O)CH₃.

### Embodiment 222

[0273] The compound of embodiment 221 wherein the moiety having Formula I is linked to the oligomeric compound through a connecting group.

### Embodiment 223

[0274] The compound of embodiment 221 or 222 having Formula II:

[chemical structure]

wherein:

[0275] R₁ is selected from Q₁, CH₂Q₁, CH₂OH, CH₂NJ₁J₂, CH₂N₃ and CH₂SJ₃;

[0276] Q₁ is selected from aryl, substituted aryl, heterocyclic, substituted heterocyclic, heteroaryl and substituted heteroaryl;

[0277] R₂ is selected from N₃, CN, halogen, N(H)C(═O)-Q₂, substituted thiol, aryl, substituted aryl, heterocyclic, substituted heterocyclic, heteroaryl and substituted heteroaryl;

[0278] Q₂ is selected from H, C₁-C₆ alkyl, substituted C₁-C₆ alkyl, C₁-C₆ alkoxy, substituted C₁-C₆ alkoxy, aryl, substituted aryl, heterocyclic, substituted heterocyclic, heteroaryl and substituted heteroaryl;

[0279] Y is selected from O, S, CJ₄J₅, NJ₆ and N(J₆)C(═O);

[0280] L is a connecting group;

[0281] J₁, J₂, J₃, J₄, J₅ and J₆ are each, independently, H or a substituent group;

[0282] T₁ is said oligomer; and

[0283] each substituent group is, independently, mono or poly substituted with optionally protected substituent groups independently selected from halogen, C₁-C₆ alkyl, C₁-C₆ alkoxy, aryl, heterocyclic and heteroaryl wherein each substituent group can include a linear or branched alkylene group optionally including one or more groups independently selected from O, S, NH and C(═O), and wherein each substituent group may be further substituted with one or more groups independently selected from C₁-C₆ alkyl, halogen or C₁-C₆ alkoxy wherein each cyclic group is mono or polycyclic.

[0284] In embodiments having more than one of a particular variable (e.g., more than one “m” or “n”), unless otherwise indicated, each such particular variable is selected independently. Thus, for a structure having more than one n, each n is selected independently, so they may or may not be the same as one another.

### DETAILED DESCRIPTION

[0285] It is to be understood that both the foregoing general description and the following detailed description are exemplary and explanatory only and are not restrictive of the disclosure. Herein, the use of the singular includes the plural unless specifically stated otherwise. As used herein, the use of “or” means “and/or” unless stated otherwise. Furthermore, the use of the term “including” as well as other forms, such as “includes” and “included”, is not limiting. Also, terms such as “element” or “component” encompass both elements and components comprising one unit and elements and components that comprise more than one subunit, unless specifically stated otherwise.

[0286] The present disclosure provides compositions and methods for the local as well as systemic delivery of conjugated oligomeric compounds such as conjugated antisense compounds to an animal via non-parenteral means. In particular, the present invention provides compositions and methods for modulating the in vivo expression of a gene in an animal through the non-parenteral administration of a conjugated oligomeric compound, thereby circumventing the complications and expense which may be associated with intravenous and other parenteral routes of administration.

[0287] In certain embodiments, enhanced bioavailability is achieved via the non-parenteral administration of compositions provided herein. The term “bioavailability” refers to a measurement of what portion of an administered drug reaches the circulatory system when a non-parenteral mode of administration is used to introduce the drug into an animal. The term is used for drugs whose efficacy is related to the blood concentration achieved, even if the drug's ultimate site of action is intracellular (van Berge-Henegouwen et al., Gastroenterol., 1977, 73, 300). Traditionally, bioavailability studies determine the degree of intestinal absorption of a drug by measuring the change in peripheral blood levels of the drug after an oral dose (DiSanto, Chapter 76 In: Remington's Pharmaceutical Sciences, 18th Ed., Gennaro, ed., Mack Publishing Co., Easton, Pa., 1990, pages 1451-1458). The area under the curve (AUC₀) is divided by the area under the curve after an intravenous (i.v.) dose (AUCᵢᵥ) and the quotient is used to calculate the fraction of drug absorbed. This approach cannot be used, however, with compounds which have a large “first pass clearance,” i.e., compounds for which hepatic uptake is so rapid that only a fraction of the absorbed material enters the peripheral blood. For such compounds, other methods must be used to determine the absolute bioavailability (van Berge-Henegouwen et al., Gastroenterol., 1977, 73, 300). With regards to oligonucleotides, studies suggest that they are rapidly eliminated from plasma and accumulate mainly in the liver and kidney after i.v. administration (Miyao et al., Antisense Res. Dev., 1995, 5, 115; Takakura et al., Antisense & Nucl. Acid Drug Dev., 1996, 6, 177).

[0288] Another “first pass effect” that applies to orally administered drugs is degradation due to the action of gastric acid and various digestive enzymes. Furthermore, the entry of many high molecular weight active agents (such as peptides, proteins and oligonucleotides) and some conventional and/or low molecular weight drugs (e.g., insulin, vasopressin, leucine enkephalin, etc.) through mucosal routes (such as oral, pulmonary, buccal, rectal, transdermal, vaginal and ocular) to the bloodstream is frequently obstructed by poor transport across epithelial cells and concurrent metabolism during transport. This type of degradative metabolism is known for oligonucleotides and nucleic acids. For example, phosphodiesterases are known to cleave the phosphodiester linkages of oligonucleotides and many other modified linkages present in oligomeric compounds such as synthesized oligonucleotides.

[0289] One means of ameliorating first pass clearance effects is to increase the dose of administered drug, thereby compensating for proportion of drug lost to first pass clearance. Although this may be readily achieved with i.v. administration by, for example, simply providing more of the drug to an animal, other factors influence the bioavailability of drugs administered via non-parenteral means. For example, a drug may be enzymatically or chemically degraded in the alimentary canal or blood stream and/or may be impermeable or semipermeable to various mucosal membranes.

[0290] It has now been found that oligonucleotides can be introduced effectively into animals via non-parenteral means through coadministration of “mucosal penetration enhancers,” also known as “absorption enhancers” or simply as “penetration enhancers”. These are substances which facilitate the transport of a drug across mucous membrane(s) associated with the desired mode of administration.

[0291] As used herein “excipient” means any compound or mixture of compounds that is added to a composition as provided herein that is suitable for non-parenteral delivery of a conjugated oligomeric compound. In certain embodiments, an excipient enhances the uptake of the conjugated oligomeric compound and or the ultimate bioavailability of the oligomeric compound. Typical pharmaceutical excipients include, but are not limited to, penetration enhancers, binding agents (e.g., pregelatinized maize starch, polyvinylpyrrolidone or hydroxypropyl methylcellulose, etc.); fillers (e.g., lactose and other sugars, microcrystalline cellulose, pectin, gelatin, calcium sulfate, ethyl cellulose, polyacrylates or calcium hydrogen phosphate, etc.); lubricants (e.g., magnesium stearate, talc, silica, colloidal silicon dioxide, stearic acid, metallic stearates, hydrogenated vegetable oils, corn starch, polyethylene glycols, sodium benzoate, sodium acetate, etc.); disintegrants (e.g., starch, sodium starch glycolate, EXPLOTAB); and wetting agents (e.g., sodium lauryl sulphate, etc.). In certain embodiments, an excipient as used herein may include any compounds or mixture of compounds that improve oral delivery of the compositions of the present invention.

[0292] In certain embodiments, the excipient includes a pharmaceutically acceptable solvent, suspending agent or any other pharmacologically inert vehicle for delivering one or more conjugated oligomeric compounds to an animal. The excipient may be liquid or solid and is selected, with the planned manner of administration in mind, so as to provide for the desired bulk, consistency, etc., when combined with a conjugated oligomeric compound and the other components of a given pharmaceutical composition. Typical pharmaceutical carriers include, but are not limited to, binding agents (e.g., pregelatinised maize starch, polyvinylpyrrolidone or hydroxypropyl methylcellulose, etc.); fillers (e.g., lactose and other sugars, microcrystalline cellulose, pectin, gelatin, calcium sulfate, ethyl cellulose, polyacrylates or calcium hydrogen phosphate, etc.); lubricants (e.g., magnesium stearate, talc, silica, colloidal silicon dioxide, stearic acid, metallic stearates, hydrogenated vegetable oils, corn starch, polyethylene glycols, sodium benzoate, sodium acetate, etc.); disintegrants (e.g., starch, sodium starch glycolate, EXPLOTAB); and wetting agents (e.g., sodium lauryl sulphate, etc.). Excipients may include one or more penetration enhancers, a capsule or pill formulation, an enteric component or any other pharmaceutically acceptable component.

[0293] In certain embodiments, the excipient includes a pharmaceutically acceptable organic or inorganic carrier substances suitable for oral administration which do not deleteriously react with nucleic acids can also be used to formulate the compositions of the present invention. Suitable pharmaceutically acceptable carriers include, but are not limited to, water, salt solutions, alcohols, polyethylene glycols, gelatin, lactose, amylose, magnesium stearate, talc, silicic acid, viscous paraffin, hydroxymethylcellulose, polyvinylpyrrolidone and the like. The formulations can be sterilized and, if desired, mixed with auxiliary agents, e.g., lubricants, preservatives, stabilizers, wetting agents, emulsifiers, salts for influencing osmotic pressure, buffers, colorings flavorings and/or aromatic substances and the like which do not deleteriously interact with the oligomeric compounds of the formulation.

[0294] In certain embodiments, the excipient includes emulsifiers, stabilizers, dyes, and anti-oxidants may also be present in emulsions as needed. Pharmaceutical emulsions may also be multiple emulsions that are comprised of more than two phases such as, for example, in the case of oil in water in oil (o/w/o) and water in oil in water (w/o/w) emulsions. Such complex formulations often provide certain advantages that simple binary emulsions do not. Multiple emulsions in which individual oil droplets of an o/w emulsion enclose small water droplets constitute a w/o/w emulsion. Likewise a system of oil droplets enclosed in globules of water stabilized in an oily continuous provides an o/w/o emulsion.

[0295] In certain embodiments, the excipient includes one or more penetration enhancers. Penetration enhancers have been widely studied as a means to increase both paracellular and transcellular uptake of compounds. There are at least 11 distinct chemical categories of penetration enhancers (Whitehead et al., Pharmaceutical Research, 2008, 25(8), 1782-1788). These categories include but are not limited to anionic surfactants, cationic surfactants, zwitterionic surfactants, nonionic surfactants, bile salts, fatty acids fatty esters, fatty amines, sodium salts of fatty acids, nitrogen containing rings, and others. In addition, bacterial toxins (enterotoxins) have also been shown to increase permeability of the gastrointestinal layer, as well as the process of inflammation itself (Salama, et al., Advanced Drug Delivery Reviews, 2006, 58, 15-28). Glucose solutions have been shown to expand tight junctions (Salamat-Miller, et al., International Journal of pharmaceutics, 2005, 294, 201-216); the data suggest that the effects of a meal initiates the opening of the tight junctions by osmotic force, stimulating the flow of water through the paracellular pathway and carrying dissolved solutes in the convective stream (the so called “solvent drag”). Peptide based permeability enhancers, including toxins and venom derivatives have also been used, and some are briefly described below. Finally, there are a host of technologies to encapsulate actives for transport, not all of which are targeted for class III molecules, marketed by companies for oral delivery of poorly absorbed compounds.

[0296] In certain embodiments, the excipient includes one or more penetration enhancers selected from sodium caprate (C10) alone or in mixture, sodium caprylate (C12) alone or in mixture, sodium-2-ocyldodecanoate (C20) alone or in mixture, UDCA alone or in mixture, fatty acid mixture (C10, C12, C20, and/or UDCA), SNAC and AT1006.

[0297] In certain embodiments, the excipient includes one or more penetration enhancers selected from sodium laurate, bile salts, PEG-3350, POE, lecithin, Gantrex-AN-169, 5% Gantrex.AN-169 and 5% Carbopol 974P, 1% Eudragit, Labrasol, alkyl saccharide, lipids, EDTA buffer, Gantrez/bioadhesives, sodium phosphate tribasic and UDC.

[0298] In certain embodiments, the excipient includes one or more compounds and or mixtures selected from Sodium Caprate (C10), either alone or in conjunction with Sodium Caprylate (C12); Transcellular N-[8-2-hydroxybenzoyl) aminol caprylate (an acetylated amino acid); C12, sodium caprylate as an adjunct to C10; UDCA, also used as an adjunct to C10; sodium laurate; bile salts, fatty acids mixture (C10, C12, UDCA); POE; Lecithin; C20 (sodium-2-ocyldodecanoate); PEG 3350; Gantrex AN-169; 5% Gantrex AN-169 and 5% Carbopol 974P; 5% Gantrex AN-169; 1% Eudragit; Cumulase, Labrasol; alkyl saccharide; lipids; EDTA; Gantrez with bioadhesives; sodium phosphate tribasic and UDC.

[0299] In certain embodiments, the excipient includes one or more compounds and or mixtures selected from Chitosans, biodegradable mucopolysaccharides; Zonal Occluden toxin (ZOT); Melittin; C-CPE; Cell Penetrating Peptides (CPPs); Proteases; Lipids (sphingosines, alkylglucosides, oxidized lipids, ether lipids); and Multiple tight junction targeted modulators have been tried and reviewed (Deli, Maria A., Biochimica et Biophysica Acta, 2009, 1788, 892-910).

[0300] In certain embodiments, the excipient includes Nano-particles and or other carriers, to ferry macromolecules across the membrane, either as complexes in lipid matrixes or other complex macromolecules.

[0301] In certain embodiments, the excipient includes a mucoadhesive patch system for drug delivery (PCT International application WO 03/007913 A2, published on Jan. 30, 2003, the entire contents of which are incorporated herein by reference).

[0302] A “pharmaceutically acceptable” component of a formulation of the invention is one which, when used together with excipients, diluents, stabilizers, preservatives and other ingredients are appropriate to the nature, composition and mode of administration of a formulation. Accordingly it is desired to select penetration enhancers which facilitate the uptake of conjugated oligomeric compounds such as conjugated antisense oligonucleotides, without interfering with the activity of the oligomeric compounds and in a manner such that the same can be introduced into the body of an animal without unacceptable side-effects such as toxicity, irritation or allergic response.

[0303] In certain embodiments, the present invention provides compositions comprising one or more pharmaceutically acceptable penetration enhancers, and methods of using such compositions, which result in the improved bioavailability of conjugated oligomeric compounds administered via non-parenteral modes of administration. Heretofore, certain penetration enhancers have been used to improve the bioavailability of certain drugs. See Muranishi, Crit. Rev. Ther. Drug Carrier Systems, 1990, 7, 1 and Lee et al., Crit. Rev. Ther. Drug Carrier Systems, 1991, 8, 91. However, it is generally viewed to be the case that effectiveness of such penetration enhancers is unpredictable. Therefore, it has been surprisingly found that the uptake and delivery of oligonucleotides, relatively complex molecules which are known to be difficult to administer to animals and man, can be greatly improved even when administered by non-parenteral means through the use of a number of different classes of penetration enhancers.

[0304] In certain embodiments, the present invention provides compositions comprising one or more carrier particles. As used herein “carrier particle” means a granule, bead, microparticle, miniparticle, nanoparticle or any other solid dosage form which can be incorporated into an oral pharmaceutical formulation as described herein.

[0305] Preferred carrier particle-forming substances include poly-amino acids, polyimines, polyacrylates, dendrimers, polyalkylcyanoacrylates, cationized gelatins, albumins, starches, acrylates, polyethyleneglycols (PEG), DEAE-derivatized polyimines, pollulans and celluloses.

[0306] In other preferred embodiments, the carrier particle-forming substance includes polycationic polymers such as chitosan, poly-L-lysine, polyhistidine, polyornithine, polyspermines, protamine, polyvinylpyridine, polythiodiethylamino-methylene P(TDAE), polyaminostyrene (e.g. para-amino), poly(methylcyanoacrylate), poly (ethylcyanoacrylate), poly (butylcyanoacrylate), poly(isobutylcyanoacrylate), poly(isohexylcyanoacrylate), DEAE-methacrylate, DEAE-hexylacrylate, DEAE-acrylamide, DEAE-albumin and DEAE-dextran. In another preferred embodiment, the particle-forming substance is poly-L-lysine complexed with alginate.

[0307] In certain embodiments, carrier particle-forming substances are non-polycationic, i.e., carry an overall neutral or negative charge, such as polyacrylates, for example polyalkylacrylates (e.g., methyl, hexyl), polyoxethanes, poly(DL-lactic-co-glycolic acid) (PLGA) and polyethyleneglycol.

[0308] In certain embodiments, the pharmaceutical compositions of the invention may further comprise a bioadhesive material that serves to adhere carrier particles to mucosal membranes. Carrier particles may themselves be bioadhesive, as is the case with PLL-alginate carrier particles, or may be coated with a bioadhesive material. Such materials are well known in the formulation art, examples of which are described in PCT WO85/02092, the contents of which are incorporated herein by reference in its entirety. Preferred bioadhesive materials include polyacrylic polymers (e.g. carbomer and derivatives of carbomer), tragacanth, polyethyleneoxide cellulose derivatives (e.g. methylcellulose, carboxymethylcellulose, hydroxypropylmethylcellulose (HPMC), hydroxyethylcellulose (HEC), hydroxypropylcellulose (HPC) and sodium carboxymethylcellulose (NaCPC)), karya gum, starch, gelatin and pectin.

[0309] The compositions of the invention may further comprise a mucolytic substance which serves to degrade or erode mucin, partially or completely, at the site of the mucosal membrane to be traversed. Mucolytic substances are well known in the formulation art and include N-acetylcysteine, dithiothreitol, pepsin, pilocarpine, guaifenesin, glycerol guaiacolate, terpin hydrate, ammonium chloride, guattenesin, ambroxol, bromhexine, carbocysteine, domiodol, letosteine, mecysteine, mesna, sobrerol, stepronin, tiopronin and tyloxapol.

[0310] In certain embodiments, conjugated oligomeric compounds are associated with the carrier particles by electrostatic (e.g., ionic, polar, Van der Waals), covalent or mechanical (non-electrostatic, non-covalent) interactions depending on the drug and carrier particles, as well as the method of preparing the carrier particles. For example, an anionic drug such as a conjugated oligomeric compound such as an antisense oligonucleotide can be bound to cationic carrier particles by ionic interaction.

[0311] The effective non-parenteral use and administration of compositions of the present invention involves consideration of a number of different aspects about drug therapy. One important consideration when using the compositions and methods of the present invention is the mode of administration of the pharmaceutical composition containing the therapeutic conjugated oligomeric compound such as a conjugated antisense oligonucleotide. Non-parenteral modes of administration include, but are not limited to, buccal, sublingual, endoscopic, oral, rectal, transdermal, topical, nasal, intratracheal, pulmonary, urethral, vaginal, and ocular. In certain embodiments, administered by such non-parenteral modes the methods and compositions of the present invention deliver drug both locally and systemically as desired.

[0312] Another consideration of importance when using the compositions and methods of the present invention is the use and nature of penetration enhancers and carriers. Penetration enhancers facilitate the transport of drug molecules, for example, oligonucleotides and other nucleic acids, across mucosal and other epithelial cell membranes. Penetration enhancers include, but are not limited to, members of molecular classes such as surfactants, fatty acids, bile salts, chelating agents, and non-chelating non-surfactant molecules. Carriers are inert molecules that may be included in the compositions of the present invention to interfere with processes that lead to reduction in the levels of bioavailable nucleic acid or oligonucleotide drug.

[0313] Another important aspect of the compositions and methods of the present invention is the nature of the conjugated oligomeric compounds used. The conjugated oligomeric compounds of the present invention may be modified by using various conjugate groups and modified oligomeric compounds. Such modified oligomeric compounds comprise at least one modified internucleoside linkage, modified sugar, modified base or any combination thereof.

[0314] In certain embodiments, the absorption of conjugated oligomeric compounds is enhanced through modification of the oligomeric compound (Geary, et al., The Journal of Pharmacology and Experimental Therapeutics, 2001, 296 (3), 898-904). Such modifications include but are not limited decreased length of the oligomeric compound, 2′-MOE substituent groups, 5′-methylation of cytosines, and the presence of phosphodiester backbone in MOE modified compounds. Such modifications have been shown to increased intestinal permeability of antisense compounds in rats using an in situ infusion model. Methylphosphonate linkages have been shown to reduce the charge on oligomeric compounds and thus increase permeability.

[0315] Another important aspect of the compositions and methods of the present invention is the nature of the composition. Pharmaceutical compositions of the present invention include, but are not limited to, solutions, emulsions (including microemulsions and creams), and liposome-containing formulations. These compositions may be generated from a variety of components that include, but are not limited to, preformed liquids, self-emulsifying solids and self-emulsifying semisolids. The compositions of the present invention may be formulated into any of many possible dosage forms such as, but not limited to, tablets, capsules, liquid syrups, soft gels, suppositories, and enemas.

[0316] In certain embodiments, the compositions of the invention are provided for oral administration in the form of a capsule, tablet, compression coated tablet or bilayer tablet. In certain embodiments, these formulations comprise an enteric outer coating which resists degradation in the stomach and dissolves in the intestinal lumen. In certain embodiments, the formulation comprises an enteric material effective in protecting the conjugated oligomeric compounds from pH extremes of the stomach, or in releasing the conjugated oligomeric compounds over time to optimize the delivery thereof to a particular mucosal site. Enteric materials for acid-resistant tablets, capsules and caplets are known in the art and typically include acetate phthalate, propylene glycol, sorbitan monoleate, cellulose acetate phthalate (CAP), cellulose acetate trimellitate, hydroxypropyl methyl cellulose phthalate (HPMCP), methacrylates, chitosan, guar gum, pectin, locust bean gum and polyethylene glycol (PEG). One particularly useful type of methacrylate are the Eudragits™. These are anionic polymers that are water-impermeable at low pH, but become ionized and dissolve at intestinal pH. EUDRAGITS™ L100 and S100 are copolymers of methacrylic acid and methyl methacrylate.

[0317] Enteric materials may be incorporated within the dosage form or may be a coating substantially covering the entire surface of tablets, capsules or caplets. Enteric materials may also be accompanied by plasticizers that impart flexible resiliency to the material for resisting fracturing, for example during tablet curing or aging. Plasticizers are known in the art and typically include diethyl phthalate (DEP), triacetin, dibutyl sebacate (DBS), dibutyl phthalate (DBP) and triethyl citrate (TEC).

[0318] Another important aspect of the compositions and methods of the present invention is the means by which such compositions may be administered. Thus the dose, method of administration or application, and the use of additives are all worthy of consideration in this regard. Further, the methods and compositions of the present invention may be used to ameliorate a variety of diseases via local or systemic treatment. Such local or systemic treatment may be accomplished using the methods and compositions of the present invention via modes of administration that include, but are not limited to, buccal, sublingual, endoscopic, oral, rectal, transdermal, topical, nasal, pulmonary, urethral, vaginal, and ocular modes.

[0319] The present invention provides compositions and methods for local and systemic delivery of one or more oligomeric compounds to an animal via non-parenteral administration. For purposes of the invention, the term “animal” is meant to encompass humans as well as other mammals, as well as reptiles, fish, amphibians, and birds. The term “non-parenteral delivery” refers to the administration, directly or otherwise, of the drug via a non-invasive procedure which typically does not entail the use of a syringe and needle. Non-parenteral administration may be, but is not limited to, delivery of the drug via the alimentary canal or via transdermal, topical, nasal, pulmonary, urethral, vaginal or ocular routes. The term “alimentary canal” refers to the tubular passage in an animal that functions in the digestion and absorption of food and the elimination of food residue, which runs from the mouth to the anus, and any and all of its portions or segments, e.g., the oral cavity, the esophagus, the stomach, the small and large intestines and the colon, as well as compound portions thereof such as, e.g., the gastro-intestinal tract. Thus, the term “alimentary delivery” encompasses several routes of administration including, but not limited to, oral, rectal, endoscopic and sublingual/buccal administration. A common requirement for these modes of administration is absorption over some portion or all of the alimentary tract and a need for efficient mucosal penetration of the nucleic acid(s) so administered.

[0320] In addition, iontophoresis (transfer of ionic solutes through biological membranes under the influence of an electric field) (Lee et al., Critical Reviews in Therapeutic Drug Carrier Systems, 1991, p. 163), phonophoresis or sonophoresis (use of ultrasound to enhance the absorption of various therapeutic agents across biological membranes, notably the skin and the cornea) (Lee et al., Critical Reviews in Therapeutic Drug Carrier Systems, 1991, p. 166), and optimization of vehicle characteristics relative to dose deposition and retention at the site of administration (Lee et al., Critical Reviews in Therapeutic Drug Carrier Systems, 1991, p. 168) may be useful methods for enhancing the transport of drugs across mucosal sites in accordance with the present invention.

[0321] Drugs administered by the oral route can often be alternatively administered by the lower enteral route, i.e., through the anus into the rectum or lower intestine. Rectal suppositories, retention enemas or rectal catheters can be used for this purpose and may be preferred when patient compliance might otherwise be difficult to achieve (e.g., in pediatric and geriatric applications, or when the patient is vomiting or unconscious). Rectal administration can result in more prompt and higher blood levels than the oral route. (Harvey, Chapter 35 In: Remington's Pharmaceutical Sciences, 18th Ed., Gennaro, ed., Mack Publishing Co., Easton, Pa., 1990, page 711). Because about 50% of the drug that is absorbed from the rectum will bypass the liver, administration by this route significantly reduces the potential for first-pass metabolism (Benet et al., Chapter 1 In: Goodman & Gilman's The Pharmacological Basis of Therapeutics, 9th Ed., Hardman et al., eds., McGraw-Hill, New York, N.Y., 1996).

[0322] Endoscopy may be used for drug delivery directly to an interior portion of the alimentary tract. For example, endoscopic retrograde cystopancreatography (ERCP) takes advantage of extended gastroscopy and permits selective access to the biliary tract and the pancreatic duct (Hirahata et al., Gan To Kagaku Ryoho, 1992, 19(10 Suppl.), 1591). Pharmaceutical compositions, including liposomal formulations, can be delivered directly into portions of the alimentary canal, such as, e.g., the duodenum (Somogyi et al., Pharm. Res., 1995, 12, 149) or the gastric submucosa (Akamo et al., Japanese J. Cancer Res., 1994, 85, 652) via endoscopic means. Gastric lavage devices (Inoue et al., Artif Organs, 1997, 21, 28) and percutaneous endoscopic feeding devices (Pennington et al., Ailment Pharmacol. Ther., 1995, 9, 471) can also be used for direct alimentary delivery of pharmaceutical compositions.

[0323] The preferred method of non-parenteral administration for most drugs is oral delivery. This is typically the most convenient route for access to the systemic circulation. Absorption from the alimentary canal is governed by factors that are generally applicable, e.g., surface area for absorption, blood flow to the site of absorption, the physical state of the drug and its concentration at the site of absorption (Benet et al., Chapter 1 In: Goodman & Gilman's The Pharmacological Basis of Therapeutics, 9th Ed., Hardman et al., eds., McGraw-Hill, New York, N.Y., 1996, pages 5-7). A significant factor which may limit the oral bioavailability of a drug is the degree of “first pass effects.” For example, some substances have such a rapid hepatic uptake that only a fraction of the material absorbed enters the peripheral blood (Van Berge-Henegouwen et al., Gastroenterology, 1977, 73:300). The compositions and methods of the invention circumvent, at least partially, such first pass effects by providing improved uptake of nucleic acids by, e.g., causing the hepatic uptake system to become saturated and allowing a significant portion of the nucleic acid so administered to reach the peripheral circulation.

[0324] Topical administration is often chosen when local delivery of a drug is desired at, or immediately adjacent to the point of application of the drug composition or formulation. Although occasionally enough drug is absorbed into the systemic circulation to cause systemic effects, topical routes generally are not effective for systemic therapy. Three general types of topical routes of administration are recognized, topical administration of a drug composition to mucous membranes, skin or eyes.

[0325] Drugs that are applied to the mucous membranes produce primarily local effects. This route of administration includes application of drug compositions to mucous membranes of the conjunctiva, nasopharynx, oropharynx, vagina, colon, urethra, and urinary bladder. Absorption of drugs occurs rapidly through mucous membranes and is an effective route for localized therapy and, on occasion, for systemic therapy.

[0326] Transdermal drug delivery is a valuable route for the administration of lipid soluble therapeutics. It has been recognized that the dermis is more permeable than the epidermis and therefore absorption of drugs is much more rapid through abraded, burned or denuded skin. Inflammation and other physiologic conditions that increase blood flow to the skin also enhance absorption via the transdermal route. Absorption by this route may be enhanced via the use of an oily vehicle (inunction) or through the use of penetration enhancers. Hydration of the skin and the use of controlled release topical patches are also effective ways to administer drugs via the transdermal route. This route provides a means to deliver the drug for both systemic and local therapy.

[0327] Ocular delivery of drugs is especially useful for the local treatment of eye infections or abnormalities. The drug is typically administered via instillation and absorption of the drug occurs through the cornea. Corneal infection or trauma may thus result in more rapid absorption. Ophthalmic delivery systems that provide prolonged duration of action (e.g., suspensions and ointments) and ocular inserts that provide continuous delivery of low amounts of drugs are useful additions to ophthalmic therapy. The ocular delivery of drugs results in predominantly local effects. Systemic absorption that results from drainage via the nasolachrimal canal is limited and few systemic side effects are typically observed.

[0328] In certain embodiments, the compositions of the present invention comprise one or more penetration enhancers in order to effect transport of conjugated oligomeric compounds across mucosal and epithelial membranes. Penetration enhancers may be classified as belonging to one of five broad categories—surfactants, fatty acids, bile salts, chelating agents, and non-chelating non-surfactants (Lee et al., Critical Reviews in Therapeutic Drug Carrier Systems, 1991, p. 92). Each of these classes is discussed in more detail in the following paragraphs. Carrier substances (or simply “carriers”), which reduce first pass effects by, e.g., saturating the hepatic uptake system, are also herein described.

[0329] In connection with the present invention, surfactants (or “surface-active agents”) are chemical entities which, when dissolved in an aqueous solution, reduce the surface tension of the solution or the interfacial tension between the aqueous solution and another liquid, with the result that absorption of conjugated oligomeric compounds through the alimentary mucosa and other epithelial membranes is enhanced. In addition to bile salts and fatty acids, surfactants include, for example, sodium lauryl sulfate, polyoxyethylene-9-lauryl ether and polyoxyethylene-20-cetyl ether (Lee et al., Critical Reviews in Therapeutic Drug Carrier Systems, 1991, page 92); and perfluorochemical emulsions, such as FC-43 (Takahashi et al., J. Pharm. Phamacol., 1988, 40, 252).

[0330] In certain embodiments, one or more fatty acids including their derivatives which act as penetration enhancers are used in compositions of the present invention. Such fatty acids include, for example, oleic acid, lauric acid, capric acid (n-decanoic acid), myristic acid, palmitic acid, stearic acid, linoleic acid, linolenic acid, dicaprate, tricaprate, monoolein (1-monooleoyl-rac-glycerol), dilaurin, caprylic acid, arachidonic acid, glyceryl 1-monocaprate, 1-dodecylazacycloheptan-2-one, acylcarnitines, acylcholines and mono- and di-glycerides thereof and/or physiologically acceptable salts thereof (i.e., oleate, laurate, caprate, myristate, palmitate, stearate, linoleate, etc.) (Lee et al., Critical Reviews in Therapeutic Drug Carrier Systems, 1991, page 92; Muranishi, Critical Reviews in Therapeutic Drug Carrier Systems, 1990, 7, 1; El-Hariri et al., J. Pharm. Pharmacol., 1992, 44, 651).

[0331] A variety of bile salts also function as penetration enhancers to facilitate the uptake and bioavailability of drugs. The physiological roles of bile include the facilitation of dispersion and absorption of lipids and fat-soluble vitamins (Brunton, Chapter 38 In: Goodman & Gilman's The Pharmacological Basis of Therapeutics, 9th Ed., Hardman et al., eds., McGraw-Hill, New York, N.Y., 1996, pages 934-935). Various natural bile salts, and their synthetic derivatives, act as penetration enhancers. Thus, the term “bile salt” includes any of the naturally occurring components of bile as well as any of their synthetic derivatives. The bile salts of the invention include, for example, cholic acid (or its pharmaceutically acceptable sodium salt, sodium cholate), dehydrocholic acid (sodium dehydrocholate), deoxycholic acid (sodium deoxycholate), glucholic acid (sodium glucholate), glycholic acid (sodium glycocholate), glycodeoxycholic acid (sodium glycodeoxycholate), taurocholic acid (sodium taurocholate), taurodeoxycholic acid (sodium taurodeoxycholate), chenodeoxycholic acid (CDCA, sodium chenodeoxycholate), ursodeoxycholic acid (UDCA), sodium tauro-24,25-dihydro-fusidate (STDHF), sodium glycodihydrofusidate and polyoxyethylene-9-lauryl ether (POE) (Lee et al., Critical Reviews in Therapeutic Drug Carrier Systems, 1991, page 92; Swinyard, Chapter 39 In: Remington's Pharmaceutical Sciences, 18th Ed., Gennaro, ed., Mack Publishing Co., Easton, Pa., 1990, pages 782-783; Muranishi, Critical Reviews in Therapeutic Drug Carrier Systems, 1990, 7, 1; Yamamoto et al., J. Pharm. Exp. Ther., 1992, 263, 25; Yamashita et al., J. Pharm. Sci., 1990, 79, 579).

[0332] In certain embodiments, penetration enhancers useful in the present invention are mixtures of penetration enhancing compounds. For example, a particularly preferred penetration enhancer is a mixture of UDCA (and/or CDCA) with capric and/or lauric acids or salts thereof e.g. sodium. Such mixtures are useful for enhancing the delivery of biologically active substances across mucosal membranes, in particular intestinal mucosa. Preferred penetration enhancer mixtures comprise about 5-95% of bile acid or salt(s) UDCA and/or CDCA with 5-95% capric and/or lauric acid. Particularly preferred are mixtures of the sodium salts of UDCA, capric acid and lauric acid in a ratio of about 1:2:2 respectively.

[0333] In certain embodiments, chelating agents, as used in connection with the present invention, can be defined to be compounds that remove metallic ions from solution by forming complexes therewith, with the result that absorption of conjugated oligomeric compounds through the alimentary and other mucosa is enhanced. With regards to their use as penetration enhancers in the present invention, chelating agents have the added advantage of also serving as DNase inhibitors, as most characterized DNA nucleases require a divalent metal ion for catalysis and are thus inhibited by chelating agents (Jarrett, J. Chromatogr., 1993, 618, 315). Chelating agents of the invention include, but are not limited to, disodium ethylenediaminetetraacetate (EDTA), citric acid, salicylates (e.g., sodium salicylate, 5-methoxysalicylate and homovanilate), N-acyl derivatives of collagen, laureth-9 and N-amino acyl derivatives of beta-diketones (enamines)(Lee et al., Critical Reviews in Therapeutic Drug Carrier Systems, 1991, page 92; Muranishi, Critical Reviews in Therapeutic Drug Carrier Systems, 1990, 7, 1; Buur et al., J. Control Rel., 1990, 14, 43).

[0334] As used herein, non-chelating non-surfactant penetration enhancers mean compounds that demonstrate insignificant activity as chelating agents or as surfactants but that nonetheless enhance absorption of conjugated oligomeric compounds through the alimentary and other mucosal membranes (Muranishi, Critical Reviews in Therapeutic Drug Carrier Systems, 1990, 7, 1). This class of penetration enhancers includes, but is not limited to, unsaturated cyclic ureas, 1-alkyl- and 1-alkenylazacyclo-alkanone derivatives (Lee et al., Critical Reviews in Therapeutic Drug Carrier Systems, 1991, page 92); and non-steroidal anti-inflammatory agents such as diclofenac sodium, indomethacin and phenylbutazone (Yamashita et al., J. Pharm. Pharmacol., 1987, 39, 621).

[0335] In certain embodiments, agents that enhance uptake of conjugated oligomeric compounds at the cellular level are added to the compositions of the present invention. For example, cationic lipids, such as lipofectin (Junichi et al, U.S. Pat. No. 5,705,188), cationic glycerol derivatives, and polycationic molecules, such as polylysine (Lollo et al., PCT Application WO 97/30731), can be used.

[0336] In certain embodiments, the compositions of the present invention include carrier compounds in the formulation. As used herein, “carrier compound” or “carrier” can refer to a nucleic acid, a conjugated nucleic acid, or analog thereof, which is inert (i.e., does not possess biological activity per se) but is recognized as a nucleic acid by in vivo processes that reduce the bioavailability of an oligomeric compound having biological activity by, for example, degrading the biologically active oligomeric compound or promoting its removal from circulation. The coadministration of a conjugated oligomeric compound and a carrier compound, typically with an excess of the latter substance, can result in a substantial reduction of the amount of nucleic acid recovered in the liver, kidney or other extracirculatory reservoirs, presumably due to competition between the carrier compound and the nucleic acid for a common receptor. For example, the recovery of a partially phosphorothioate oligonucleotide in hepatic tissue can be reduced when it is coadministered with polyinosinic acid, dextran sulfate, polycytidic acid or 4-acetamido-4′isothiocyano-stilbene-2,2′-disulfonic acid (Miyao et al., Antisense Res. Dev., 1995, 5, 115; Takakura et al., Antisense & Nucl. Acid Drug Dev., 1996, 6, 177).

[0337] There are three practical mechanisms by which a pharmaceutical formulation can be targeted into the intestine (small intestine or colon) following oral administration: activation by colonic bacterial enzymes or reducing environment created by the microflora, pH-dependent coating and time-dependent coating (coating thickness).

[0338] Delayed release coatings, and the properties which influence their dissolution, are well known in the art and are described in, for example, Bauer et al., Coated Pharmaceutical Dosage Forms, Medpharm Scientific Publishers, CRC Press, New York, 1998 and by Watts et al., Drug Devel, Industr. Pharm. 23:893-913, 1997, the entire contents of which are incorporated herein by reference.

[0339] In certain embodiments, the compositions of the present invention include other adjunct components conventionally found in pharmaceutical compositions, at their art-established usage levels. Thus, for example, the compositions may contain additional, compatible, pharmaceutically-active materials such as, for example, antipruritics, astringents, local anesthetics or anti-inflammatory agents, or may contain additional materials useful in physically formulating various dosage forms of the composition of present invention, such as dyes, flavoring agents, preservatives, antioxidants, opacifiers, thickening agents and stabilizers. However, such materials, when added, should not unduly interfere with the biological activities of the components of the compositions of the present invention.

[0340] In certain embodiments, the present invention employs conjugated oligomeric compounds such as conjugated antisense oligonucleotides for use in antisense modulation of the function of DNA or messenger RNA (mRNA) encoding a protein the modulation of which is desired, and ultimately to regulate the amount of such a protein. Hybridization of a conjugated oligomeric compound such as an antisense oligonucleotide with its mRNA target interferes with the normal role of mRNA and causes a modulation of its function in cells. The functions of mRNA to be interfered with include all vital functions such as translocation of the RNA to the site for protein translation, actual translation of protein from the RNA, splicing of the RNA to yield one or more mRNA species, turnover or degradation of the mRNA and possibly even independent catalytic activity which may be engaged in by the RNA. The overall effect of such interference with mRNA function is modulation of the expression of a protein, wherein “modulation” means either an increase (stimulation) or a decrease (inhibition) in the expression of the protein. In the context of the present invention, inhibition is the preferred form of modulation of gene expression.

[0341] Capsules used for oral delivery may include formulations that are well known in the art. Further, multicompartment hard capsules with control release properties as described by Digenis et al., U.S. Pat. No. 5,672,359, and water permeable capsules with a multi-stage drug delivery system as described by Amidon et al., U.S. Pat. No. 5,674,530 may also be used to formulate the compositions of the present invention.

[0342] Compositions for oral administration include powders or granules, suspensions or solutions in water or non-aqueous media, capsules, sachets, troches, tablets or SECs (soft elastic capsules or “caplets”). Thickeners, flavoring agents, diluents, emulsifiers, dispersing aids, carrier substances or binders may be desirably added to such formulations. A tablet may be made by compression or molding, optionally with one or more accessory ingredients.

[0343] Compressed tablets may be prepared by compressing in a suitable machine, the active ingredients in a free flowing form such as a powder or granules, optionally mixed with a binder (PVP or gums such as tragacanth, acacia, carrageenan), lubricant (e.g. stearates such as magnesium stearate), glidant (talc, colloidal silica dioxide), inert diluent, preservative, surface active or dispersing agent. Preferred binders/disintegrants include EMDEX (dextrate), PRECIROL (triglyceride), PEG, and AVICEL (cellulose). Molded tablets may be made by molding in a suitable machine a mixture of the powdered compound moistened with an inert liquid diluent. The tablets may optionally be coated or scored and may be formulated so as to provide slow or controlled release of the active ingredients therein.

[0344] Capsules used for oral delivery may include formulations that are well known in the art. Further, multicompartment hard capsules with control release properties as described by Digenis et al., U.S. Pat. No. 5,672,359, and water permeable capsules with a multi-stage drug delivery system as described by Amidon et al., U.S. Pat. No. 5,674,530 may also be used to formulate the compositions of the present invention.

[0345] The present invention provides compositions and methods for oral delivery of a drug to an animal. For purposes of the invention, the term “animal” is meant to encompass humans as well as other mammals, as well as reptiles, fish, amphibians, and birds. The compositions of the present invention may be prepared and formulated as emulsions. Emulsions are typically heterogenous systems of one liquid dispersed in another in the form of droplets usually exceeding 0.1 um in diameter. (Idson, in Pharmaceutical Dosage Forms: Disperse Systems, Vol. 1, Lieberman, Rieger and Banker, Eds., Marcel Dekker, Inc., New York, N.Y., 1988, p. 199; Rosoff, in Pharmaceutical Dosage Forms: Disperse Systems, Vol. 1, Lieberman, Rieger and Banker, Eds., Marcel Dekker, Inc., New York, N.Y., 1988, p. 245; Block, in Pharmaceutical Dosage Forms: Disperse Systems, Vol. 2, Lieberman, Rieger and Banker, Eds., Marcel Dekker, Inc., New York, N.Y., 1988, p. 335; Higuchi et al., in “Remington's Pharmaceutical Sciences,” Mack Publishing Co., Easton, Pa., 1985, p. 301). Emulsions are often biphasic systems comprising of two immiscible liquid phases intimately mixed and dispersed with each other. In general, emulsions may be either water in oil (w/o) or of the oil in water (o/w) variety. When an aqueous phase is finely divided into and dispersed as minute droplets into a bulk oily phase the resulting composition is called a water in oil (w/o) emulsion. Alternatively, when an oily phase is finely divided into and dispersed as minute droplets into a bulk aqueous phase the resulting composition is called an oil in water (o/w) emulsion.

[0346] Emulsions may contain additional components in addition to the dispersed phases and the active drug that may be present as a solution in either the aqueous phase, oily phase or itself as a separate phase. Pharmaceutical excipients such as emulsifiers, stabilizers, dyes, and anti-oxidants may also be present in emulsions as needed. Pharmaceutical emulsions may also be multiple emulsions that are comprised of more than two phases such as, for example, in the case of oil in water in oil (o/w/o) and water in oil in water (w/o/w) emulsions. Such complex formulations often provide certain advantages that simple binary emulsions do not. Multiple emulsions in which individual oil droplets of an o/w emulsion enclose small water droplets constitute a w/o/w emulsion. Likewise a system of oil droplets enclosed in globules of water stabilized in an oily continuous provides an o/w/o emulsion.

[0347] In one embodiment of the present invention, the compositions of conjugated oligomeric compounds are formulated as microemulsions. A microemulsion may be defined as a system of water, oil and amphiphile which is a single optically isotropic and thermodynamically stable liquid solution (Rosoff, in Pharmaceutical Dosage Forms: Disperse Systems, Vol. 1, Lieberman, Rieger and Banker, Eds., Marcel Dekker, Inc., New York, N.Y., 1988, p. 245). Typically microemulsions are systems that are prepared by first dispersing an oil in an aqueous surfactant solution and then adding a sufficient amount of a fourth component, generally an intermediate chain-length alcohol to form a transparent system. Therefore, microemulsions have also been described as thermodynamically stable, isotropically clear dispersions of two immiscible liquids that are stabilized by interfacial films of surface-active molecules (Leung and Shah, in: Controlled Release of Drugs: Polymers and Aggregate Systems, Rosoff, M., Ed., 1989, VCH Publishers, New York, pages 185-215). Microemulsions commonly are prepared via a combination of three to five components that include oil, water, surfactant, cosurfactant and electrolyte. Whether the microemulsion is of the water-in-oil (w/o) or an oil-in-water (o/w) type depends on the properties of the oil and surfactant used and on the structure and geometric packing of the polar heads and hydrocarbon tails of the surfactant molecules (Schott, in “Remington's Pharmaceutical Sciences,” Mack Publishing Co., Easton, Pa., 1985, p. 271).

[0348] The phenomenological approach utilizing phase diagrams has been extensively studied and has yielded a comprehensive knowledge, to one skilled in the art, of how to formulate microemulsions (Rosoff, in Pharmaceutical Dosage Forms: Disperse Systems, Vol. 1, Lieberman, Rieger and Banker, Eds., Marcel Dekker, Inc., New York, N.Y., 1988, p. 245; Block, Id., p. 335). Compared to conventional emulsions, microemulsions offer the advantage of solubilizing water-insoluble drugs in a formulation of thermodynamically stable droplets that are formed spontaneously.

[0349] Surfactants used in the preparation of microemulsions include, but are not limited to, ionic surfactants, non-ionic surfactants, Brij 96, polyoxyethylene oleyl ethers, polyglycerol fatty acid esters, tetraglycerol monolaurate (ML310), tetraglycerol monooleate (MO310), hexaglycerol monooleate (PO310), hexaglycerol pentaoleate (PO500), decaglycerol monocaprate (MCA750), decaglycerol monooleate (MO750), decaglycerol sesquioleate (SO750), decaglycerol decaoleate (DAO750), alone or in combination with cosurfactants. The cosurfactant, usually a short-chain alcohol such as ethanol, 1-propanol, and 1-butanol, serves to increase the interfacial fluidity by penetrating into the surfactant film and consequently creating a disordered film because of the void space generated among surfactant molecules. Microemulsions may, however, be prepared without the use of cosurfactants and alcohol-free self-emulsifying microemulsion systems are known in the art. The aqueous phase may typically be, but is not limited to, water, an aqueous solution of the drug, glycerol, PEG300, PEG400, polyglycerols, propylene glycols, and derivatives of ethylene glycol. The oil phase may include, but is not limited to, materials such as Captex 300, Captex 355, Capmul MCM, fatty acid esters, medium chain (C8-C12) mono, di, and tri-glycerides, polyoxyethylated glyceryl fatty acid esters, fatty alcohols, polyglycolized glycerides, saturated polyglycolized C8-C10 glycerides, vegetable oils and silicone oil.

[0350] Microemulsions are particularly of interest from the standpoint of drug solubilization and the enhanced absorption of drugs. Lipid based microemulsions (both o/w and w/o) have been proposed to enhance the oral bioavailability of drugs, including peptides (Constantinides et al., Pharmaceutical Research, 1994, 11, 1385; Ritschel, Meth. Find. Exp. Clin. Pharmacol., 1993, 13, 205). Microemulsions afford advantages of improved drug solubilization, protection of drug from enzymatic hydrolysis, possible enhancement of drug absorption due to surfactant-induced alterations in membrane fluidity and permeability, ease of preparation, ease of oral administration over solid dosage forms, improved clinical potency, and decreased toxicity (Constantinides et al., Pharmaceutical Research, 1994, 11, 1385; Ho et al., J. Pharm. Sci., 1996, 85, 138). Often microemulsions may form spontaneously when their components are brought together at ambient temperature. This may be particularly advantageous when formulating thermolabile drugs, peptides or oligonucleotides. Microemulsions have also been effective in the transdermal delivery of active components in both cosmetic and pharmaceutical applications. It is expected that the microemulsion compositions and formulations of the present invention will facilitate the increased systemic absorption of oligonucleotides and nucleic acids from the gastrointestinal tract, as well as improve the local cellular uptake of oligonucleotides and nucleic acids within the gastrointestinal tract

[0351] Microemulsions of the present invention may also contain additional components and additives such as sorbitan monostearate (Grill 3), Labrasol, and penetration enhancers to improve the properties of the formulation and to enhance the absorption of the oligonucleotides and nucleic acids of the present invention. Penetration enhancers used in the microemulsions of the present invention may be classified as belonging to one of five broad categories—surfactants, fatty acids, bile salts, chelating agents, and non-chelating non-surfactants (Lee et al., Critical Reviews in Therapeutic Drug Carrier Systems, 1991, p. 92). Each of these classes has been discussed above.

[0352] There are many organized surfactant structures besides microemulsions that have been studied and used for the formulation of drugs. These include monolayers, micelles, bilayers and vesicles. Vesicles, such as liposomes, have attracted great interest because of their specificity and the duration of action they offer from the standpoint of drug delivery. Further advantages are that liposomes obtained from natural phospholipids are biocompatible and biodegradable, liposomes can incorporate a wide range of water and lipid soluble drugs, liposomes can protect encapsulated drugs in their internal compartments from metabolism and degradation (Rosoff, in Pharmaceutical Dosage Forms: Disperse Systems, Vol. 1, Lieberman, Rieger and Banker, Eds., Marcel Dekker, Inc., New York, N.Y., 1988, p. 245). Important considerations in the preparation of liposome formulations are the lipid surface charge, vesicle size and the aqueous volume of the liposomes. Liposomes can be administered orally and in aerosols and topical applications.

[0353] The section headings used herein are for organizational purposes only and are not to be construed as limiting the subject matter described. All documents, or portions of documents, cited in this application, including, but not limited to, patents, patent applications, articles, books, and treatises, are hereby expressly incorporated by reference in their entirety for any purpose.

### DEFINITIONS

[0354] Unless specific definitions are provided, the nomenclature used in connection with, and the procedures and techniques of, analytical chemistry, synthetic organic chemistry, and medicinal and pharmaceutical chemistry described herein are those well known and commonly used in the art. Standard techniques may be used for chemical synthesis, and chemical analysis. Certain such techniques and procedures may be found for example in “Carbohydrate Modifications in Antisense Research” Edited by Sangvi and Cook, American Chemical Society, Washington D.C., 1994; “Remington's Pharmaceutical Sciences,” Mack Publishing Co., Easton, Pa., 21^{st} edition, 2005; and “Antisense Drug Technology, Principles, Strategies, and Applications” Edited by Stanley T. Crooke, CRC Press, Boca Raton, Fla.; and Sambrook et al., “Molecular Cloning, A laboratory Manual,” 2^{nd} Edition, Cold Spring Harbor Laboratory Press, 1989, which are hereby incorporated by reference for any purpose. Where permitted, all patents, applications, published applications and other publications and other data referred to throughout in the disclosure are incorporated by reference herein in their entirety.

[0355] Unless otherwise indicated, the following terms have the following meanings:

[0356] As used herein, “excipient for oral administration” means any compound or mixture of compounds that is added to a composition as provided herein that is suitable for oral delivery of a conjugated oligomeric compound. In certain embodiments, excipient for oral administration improve bioavailability of a composition as provided herein.

[0357] As used herein, “nucleoside” means a compound comprising a nucleobase moiety and a sugar moiety. Nucleosides include, but are not limited to, naturally occurring nucleosides (as found in DNA and RNA) and modified nucleosides. Nucleosides may be linked to a phosphate moiety.

[0358] As used herein, “chemical modification” means a chemical difference in a compound when compared to a naturally occurring counterpart. Chemical modifications of oligonucleotides include nucleoside modifications (including sugar moiety modifications and nucleobase modifications) and internucleoside linkage modifications. In reference to an oligonucleotide, chemical modification does not include differences only in nucleobase sequence.

[0359] As used herein, “furanosyl” means a structure comprising a 5-membered ring comprising four carbon atoms and one oxygen atom.

[0360] As used herein, “naturally occurring sugar moiety” means a ribofuranosyl as found in naturally occurring RNA or a deoxyribofuranosyl as found in naturally occurring DNA.

[0361] As used herein, “sugar moiety” means a naturally occurring sugar moiety or a modified sugar moiety of a nucleoside.

[0362] As used herein, “modified sugar moiety” means a substituted sugar moiety or a sugar surrogate.

[0363] As used herein, “substituted sugar moiety” means a furanosyl that is not a naturally occurring sugar moiety. Substituted sugar moieties include, but are not limited to furanosyls comprising substituents at the 2′-position, the 3′-position, the 5′-position and/or the 4′-position. Certain substituted sugar moieties are bicyclic sugar moieties.

[0364] As used herein, “2′-substituted sugar moiety” means a furanosyl comprising a substituent at the 2′-position other than H or OH. Unless otherwise indicated, a 2′-substituted sugar moiety is not a bicyclic sugar moiety (i.e., the 2′-substituent of a 2′-substituted sugar moiety does not form a bridge to another atom of the furanosyl ring.

[0365] As used herein, “MOE” means —OCH₂CH₂OCH₃.

[0366] As used herein, “2′-F nucleoside” refers to a nucleoside comprising a sugar comprising fluorine at the 2′ position. Unless otherwise indicated, the fluorine in a 2′-F nucleoside is in the ribo position (replacing the OH of a natural ribose).

[0367] As used herein the term “sugar surrogate” means a structure that does not comprise a furanosyl and that is capable of replacing the naturally occurring sugar moiety of a nucleoside, such that the resulting nucleoside sub-units are capable of linking together and/or linking to other nucleosides to form an oligomeric compound which is capable of hybridizing to a complementary oligomeric compound. Such structures include rings comprising a different number of atoms than furanosyl (e.g., 4, 6, or 7-membered rings); replacement of the oxygen of a furanosyl with a non-oxygen atom (e.g., carbon, sulfur, or nitrogen); or both a change in the number of atoms and a replacement of the oxygen. Such structures may also comprise substitutions corresponding to those described for substituted sugar moieties (e.g., 6-membered carbocyclic bicyclic sugar surrogates optionally comprising additional substituents). Sugar surrogates also include more complex sugar replacements (e.g., the non-ring systems of peptide nucleic acid). Sugar surrogates include without limitation morpholinos, cyclohexenyls and cyclohexitols.

[0368] As used herein, “bicyclic sugar moiety” means a modified sugar moiety comprising a 4 to 7 membered ring (including but not limited to a furanosyl) comprising a bridge connecting two atoms of the 4 to 7 membered ring to form a second ring, resulting in a bicyclic structure. In certain embodiments, the 4 to 7 membered ring is a sugar ring. In certain embodiments the 4 to 7 membered ring is a furanosyl. In certain such embodiments, the bridge connects the 2′-carbon and the 4′-carbon of the furanosyl.

[0369] As used herein, “nucleotide” means a nucleoside further comprising a phosphate linking group. As used herein, “linked nucleosides” may or may not be linked by phosphate linkages and thus includes, but is not limited to “linked nucleotides.” As used herein, “linked nucleosides” are nucleosides that are connected in a continuous sequence (i.e. no additional nucleosides are present between those that are linked).

[0370] As used herein, “nucleobase” means a group of atoms that can be linked to a sugar moiety to create a nucleoside that is capable of incorporation into an oligonucleotide, and wherein the group of atoms is capable of bonding with a complementary naturally occurring nucleobase of another oligonucleotide or nucleic acid. Nucleobases may be naturally occurring or may be modified.

[0371] As used herein the terms, “unmodified nucleobase” or “naturally occurring nucleobase” means the naturally occurring heterocyclic nucleobases of RNA or DNA: the purine bases adenine (A) and guanine (G), and the pyrimidine bases thymine (T), cytosine (C) (including 5-methyl C), and uracil (U).

[0372] As used herein, “modified nucleobase” means any nucleobase that is not a naturally occurring nucleobase.

[0373] As used herein, “modified nucleoside” means a nucleoside comprising at least one chemical modification compared to naturally occurring RNA or DNA nucleosides. Modified nucleosides comprise a modified sugar moiety and/or a modified nucleobase.

[0374] As used herein, “bicyclic nucleoside” or “BNA” means a nucleoside comprising a bicyclic sugar moiety.

[0375] As used herein, “constrained ethyl nucleoside” or “cEt” means a nucleoside comprising a bicyclic sugar moiety comprising a 4′-CH(CH₃)—O-2′bridge.

[0376] As used herein, “locked nucleic acid nucleoside” or “LNA” means a nucleoside comprising a bicyclic sugar moiety comprising a 4′-CH₂—O-2′bridge.

[0377] As used herein, “2′-substituted nucleoside” means a nucleoside comprising a substituent at the 2′-position other than H or OH. Unless otherwise indicated, a 2′-substituted nucleoside is not a bicyclic nucleoside.

[0378] As used herein, “deoxynucleoside” means a nucleoside comprising 2′-H furanosyl sugar moiety, as found in naturally occurring deoxyribonucleosides (DNA). In certain embodiments, a 2′-deoxynucleoside may comprise a modified nucleobase or may comprise an RNA nucleobase (e.g., uracil).

[0379] As used herein, “oligonucleotide” means a compound comprising a plurality of linked nucleosides. In certain embodiments, an oligonucleotide comprises one or more unmodified ribonucleosides (RNA) and/or unmodified deoxyribonucleosides (DNA) and/or one or more modified nucleosides.

[0380] As used herein “oligonucleoside” means an oligonucleotide in which none of the internucleoside linkages contains a phosphorus atom. As used herein, oligonucleotides include oligonucleosides.

[0381] As used herein, “modified oligonucleotide” means an oligonucleotide comprising at least one modified nucleoside and/or at least one modified internucleoside linkage.

[0382] As used herein, “linkage” or “linking group” means a group of atoms that link together two or more other groups of atoms. In certain embodiments, a linking group links together a conjugate and a oligomeric compound.

[0383] As used herein “internucleoside linkage” means a covalent linkage between adjacent nucleosides in an oligonucleotide.

[0384] As used herein “naturally occurring internucleoside linkage” means a 3′ to 5′ phosphodiester linkage.

[0385] As used herein, “modified internucleoside linkage” means any internucleoside linkage other than a naturally occurring internucleoside linkage.

[0386] As used herein, “terminal internucleoside linkage” means the linkage between the last two nucleosides of an oligonucleotide or defined region thereof.

[0387] As used herein, “phosphorus linking group” means a linking group comprising a phosphorus atom. Phosphorus linking groups include without limitation groups having the formula:

[chemical structure]

wherein:

[0388] Rₐ and R_{d} are each, independently, O, S, CH₂, NH, or NJ₁ wherein J₁ is C₁-C₆ alkyl or substituted C₁-C₆ alkyl;

[0389] R_{b} is O or S;

[0390] R_{c} is OH, SH, C₁-C₆ alkyl, substituted C₁-C₆ alkyl, C₁-C₆ alkoxy, substituted C₁-C₆ alkoxy, amino or substituted amino; and

[0391] J₁ is R_{b} is O or S.

[0392] Phosphorus linking groups include without limitation, phosphodiester, phosphorothioate, phosphorodithioate, phosphonate, phosphoramidate, phosphorothioamidate, thionoalkylphosphonate, phosphotriesters, thionoalkylphosphotriester and boranophosphate.

[0393] As used herein, “internucleoside phosphorus linking group” means a phosphorus linking group that directly links two nucleosides.

[0394] As used herein, “non-internucleoside phosphorus linking group” means a phosphorus linking group that does not directly link two nucleosides. In certain embodiments, a non-internucleoside phosphorus linking group links a nucleoside to a group other than a nucleoside. In certain embodiments, a non-internucleoside phosphorus linking group links two groups, neither of which is a nucleoside.

[0395] As used herein, “neutral linking group” means a linking group that is not charged. Neutral linking groups include without limitation phosphotriesters, methylphosphonates, MMI (—CH₂—N(CH₃)—O—), amide-3 (—CH₂—C(═O)—N(H)—), amide-4 (—CH₂—N(H)—C(═O)—), formacetal (—O—CH₂—O—), and thioformacetal (—S—CH₂—O—). Further neutral linking groups include nonionic linkages comprising siloxane (dialkylsiloxane), carboxylate ester, carboxamide, sulfide, sulfonate ester and amides (See for example: Carbohydrate Modifications in Antisense Research; Y. S. Sanghvi and P. D. Cook Eds. ACS Symposium Series 580; Chapters 3 and 4, (pp. 40-65)). Further neutral linking groups include nonionic linkages comprising mixed N, O, S and CH₂ component parts.

[0396] As used herein, “internucleoside neutral linking group” means a neutral linking group that directly links two nucleosides.

[0397] As used herein, “non-internucleoside neutral linking group” means a neutral linking group that does not directly link two nucleosides. In certain embodiments, a non-internucleoside neutral linking group links a nucleoside to a group other than a nucleoside. In certain embodiments, a non-internucleoside neutral linking group links two groups, neither of which is a nucleoside.

[0398] As used herein, “oligomeric compound” means a polymeric structure comprising two or more sub-structures. In certain embodiments, an oligomeric compound comprises an oligonucleotide. In certain embodiments, an oligomeric compound comprises one or more conjugate groups and/or terminal groups. In certain embodiments, an oligomeric compound consists of an oligonucleotide. Oligomeric compounds also include naturally occurring nucleic acids. In certain embodiments, an oligomeric compound comprises a backbone of one or more linked monomeric subunits where each linked monomeric subunit is directly or indirectly attached to a heterocyclic base moiety. In certain embodiments, oligomeric compounds may also include monomeric subunits that are not linked to a heterocyclic base moiety, thereby providing abasic sites. In certain embodiments, the linkages joining the monomeric subunits, the sugar moieties or surrogates and the heterocyclic base moieties can be independently modified. In certain embodiments, the linkage-sugar unit, which may or may not include a heterocyclic base, may be substituted with a mimetic such as the monomers in peptide nucleic acids.

[0399] As used herein, “oligomer” means any compound that comprises at least two linked subunits. In certain embodiments, an oligomeric compound comprises an oligonucleotide. In certain embodiments, an oligomeric compound comprises a modified oligonucleotide. In certain embodiments, an oligomeric compound consists of a modified oligonucleotide.

[0400] As used herein, “connecting group” means a bond or a group of atoms that link together two or more other groups of atoms. In certain embodiments, a connecting group links a ligand to a modified oligonucleotide. In certain embodiments, a connecting group comprises all or part of a linking group, a branching group, and/or a tether.

[0401] As used herein, “terminal group” means one or more atom attached to either, or both, the 3′ end or the 5′ end of an oligonucleotide. In certain embodiments a terminal group is a conjugate group. In certain embodiments, a terminal group comprises one or more terminal group nucleosides.

[0402] As used herein, “conjugate” or “conjugate group” means an atom or group of atoms bound to an oligonucleotide or oligomeric compound. In general, conjugate groups modify one or more properties of the compound to which they are attached, including, but not limited to pharmacodynamic, pharmacokinetic, binding, absorption, cellular distribution, cellular uptake, charge and/or clearance properties.

[0403] As used herein, “conjugate linker” or “linker” in the context of a conjugate group means a portion of a conjugate group comprising any atom or group of atoms and which covalently link (1) an oligonucleotide to another portion of the conjugate group or (2) two or more portions of the conjugate group.

[0404] Conjugate groups are shown herein as radicals, providing a bond for forming covalent attachment to an oligomeric compound such as an antisense oligonucleotide. In certain embodiments, the point of attachment on the oligomeric compound is the 3′-oxygen atom of the 3′-hydroxyl group of the 3′ terminal nucleoside of the oligomeric compound. In certain embodiments the point of attachment on the oligomeric compound is the 5′-oxygen atom of the 5′-hydroxyl group of the 5′ terminal nucleoside of the oligomeric compound. In certain embodiments, the bond for forming attachment to the oligomeric compound is a cleavable bond. In certain such embodiments, such cleavable bond constitutes all or part of a cleavable moiety.

[0405] In certain embodiments, conjugate groups comprise a cleavable moiety (e.g., a cleavable bond or cleavable nucleoside) and a carbohydrate cluster portion, such as a GalNAc cluster portion. Such carbohydrate cluster portion comprises: a targeting moiety and, optionally, a conjugate linker. In certain embodiments, the carbohydrate cluster portion is identified by the number and identity of the ligand. For example, in certain embodiments, the carbohydrate cluster portion comprises 3 GalNAc groups and is designated “GalNAc₃”. In certain embodiments, the carbohydrate cluster portion comprises 4 GalNAc groups and is designated “GalNAc₄”. Specific carbohydrate cluster portions (having specific tether, branching and conjugate linker groups) are described herein and designated by Roman numeral followed by subscript “a”. Accordingly “GalNac3-1ₐ” refers to a specific carbohydrate cluster portion of a conjugate group having 3 GalNac groups and specifically identified tether, branching and linking groups. Such carbohydrate cluster fragment is attached to an oligomeric compound via a cleavable moiety, such as a cleavable bond or cleavable nucleoside.

[0406] As used herein, “cleavable moiety” means a bond or group that is capable of being cleaved under physiological conditions. In certain embodiments, a cleavable moiety is cleaved inside a cell or sub-cellular compartments, such as an endosome or lysosome. In certain embodiments, a cleavable moiety is cleaved by endogenous enzymes, such as nucleases. In certain embodiments, a cleavable moiety comprises a group of atoms having one, two, three, four, or more than four cleavable bonds. In certain embodiments, a cleavable moiety is a phosphodiester linkage.

[0407] As used herein, “cleavable bond” means any chemical bond capable of being broken. In certain embodiments, a cleavable bond is selected from among: an amide, a polyamide, an ester, an ether, one or both esters of a phosphodiester, a phosphate ester, a carbamate, a di-sulfide, or a peptide.

[0408] As used herein, “carbohydrate cluster” means a compound having one or more carbohydrate residues attached to a scaffold or linker group. (see, e.g., Maier et al., “Synthesis of Antisense Oligonucleotides Conjugated to a Multivalent Carbohydrate Cluster for Cellular Targeting,” Bioconjugate Chemistry, 2003, (14): 18-29, which is incorporated herein by reference in its entirety, or Rensen et al., “Design and Synthesis of Novel N-Acetylgalactosamine-Terminated Glycolipids for Targeting of Lipoproteins to the Hepatic Asiaglycoprotein Receptor,” J. Med. Chem. 2004, (47): 5798-5808, for examples of carbohydrate conjugate clusters).

[0409] As used herein, “modified carbohydrate” means any carbohydrate having one or more chemical modifications relative to naturally occurring carbohydrates.

[0410] As used herein, “carbohydrate derivative” means any compound which may be synthesized using a carbohydrate as a starting material or intermediate.

[0411] As used herein, “carbohydrate” means a naturally occurring carbohydrate, a modified carbohydrate, or a carbohydrate derivative.

[0412] As used herein “protecting group” means any compound or protecting group known to those having skill in the art. Non-limiting examples of protecting groups may be found in “Protective Groups in Organic Chemistry”, T. W. Greene, P. G. M. Wuts, ISBN 0-471-62301-6, John Wiley & Sons, Inc, New York, which is incorporated herein by reference in its entirety.

[0413] As used herein, “single-stranded” means an oligomeric compound that is not hybridized to its complement and which lacks sufficient self-complementarity to form a stable self-duplex.

[0414] As used herein, “double stranded” means a pair of oligomeric compounds that are hybridized to one another or a single self-complementary oligomeric compound that forms a hairpin structure. In certain embodiments, a double-stranded oligomeric compound comprises a first and a second oligomeric compound.

[0415] As used herein, “antisense compound” means a compound comprising or consisting of an oligonucleotide at least a portion of which is complementary to a target nucleic acid to which it is capable of hybridizing, resulting in at least one antisense activity.

[0416] As used herein, “antisense activity” means any detectable and/or measurable change attributable to the hybridization of an antisense compound to its target nucleic acid. In certain embodiments, antisense activity includes modulation of the amount or activity of a target nucleic acid transcript (e.g. mRNA). In certain embodiments, antisense activity includes modulation of the splicing of pre-mRNA.

[0417] As used herein, “RNase H based antisense compound” means an antisense compound wherein at least some of the antisense activity of the antisense compound is attributable to hybridization of the antisense compound to a target nucleic acid and subsequent cleavage of the target nucleic acid by RNase H.

[0418] As used herein, “RISC based antisense compound” means an antisense compound wherein at least some of the antisense activity of the antisense compound is attributable to the RNA Induced Silencing Complex (RISC).

[0419] As used herein, “detecting” or “measuring” means that a test or assay for detecting or measuring is performed. Such detection and/or measuring may result in a value of zero. Thus, if a test for detection or measuring results in a finding of no activity (activity of zero), the step of detecting or measuring the activity has nevertheless been performed.

[0420] As used herein, “detectable and/or measureable activity” means a statistically significant activity that is not zero.

[0421] As used herein, “essentially unchanged” means little or no change in a particular parameter, particularly relative to another parameter which changes much more. In certain embodiments, a parameter is essentially unchanged when it changes less than 5%. In certain embodiments, a parameter is essentially unchanged if it changes less than two-fold while another parameter changes at least ten-fold. For example, in certain embodiments, an antisense activity is a change in the amount of a target nucleic acid. In certain such embodiments, the amount of a non-target nucleic acid is essentially unchanged if it changes much less than the target nucleic acid does, but the change need not be zero.

[0422] As used herein, “expression” means the process by which a gene ultimately results in a protein. Expression includes, but is not limited to, transcription, post-transcriptional modification (e.g., splicing, polyadenylation, addition of 5′-cap), and translation.

[0423] As used herein, “target nucleic acid” means a nucleic acid molecule to which an antisense compound is intended to hybridize to result in a desired antisense activity. Antisense oligonucleotides have sufficient complementarity to their target nucleic acids to allow hybridization under physiological conditions.

[0424] As used herein, “nucleobase complementarity” or “complementarity” when in reference to nucleobases means a nucleobase that is capable of base pairing with another nucleobase. For example, in DNA, adenine (A) is complementary to thymine (T). For example, in RNA, adenine (A) is complementary to uracil (U). In certain embodiments, complementary nucleobase means a nucleobase of an antisense compound that is capable of base pairing with a nucleobase of its target nucleic acid. For example, if a nucleobase at a certain position of an antisense compound is capable of hydrogen bonding with a nucleobase at a certain position of a target nucleic acid, then the position of hydrogen bonding between the oligonucleotide and the target nucleic acid is considered to be complementary at that nucleobase pair. Nucleobases comprising certain modifications may maintain the ability to pair with a counterpart nucleobase and thus, are still capable of nucleobase complementarity.

[0425] As used herein, “non-complementary” in reference to nucleobases means a pair of nucleobases that do not form hydrogen bonds with one another.

[0426] As used herein, “complementary” in reference to oligomeric compounds (e.g., linked nucleosides, oligonucleotides, or nucleic acids) means the capacity of such oligomeric compounds or regions thereof to hybridize to another oligomeric compound or region thereof through nucleobase complementarity. Complementary oligomeric compounds need not have nucleobase complementarity at each nucleoside. Rather, some mismatches are tolerated. In certain embodiments, complementary oligomeric compounds or regions are complementary at 70% of the nucleobases (70% complementary). In certain embodiments, complementary oligomeric compounds or regions are 80% complementary. In certain embodiments, complementary oligomeric compounds or regions are 90% complementary. In certain embodiments, complementary oligomeric compounds or regions are 95% complementary. In certain embodiments, complementary oligomeric compounds or regions are 100% complementary.

[0427] As used herein, “mismatch” means a nucleobase of a first oligomeric compound that is not capable of pairing with a nucleobase at a corresponding position of a second oligomeric compound, when the first and second oligomeric compound are aligned. Either or both of the first and second oligomeric compounds may be oligonucleotides.

[0428] As used herein, “hybridization” means the pairing of complementary oligomeric compounds (e.g., an antisense compound and its target nucleic acid). While not limited to a particular mechanism, the most common mechanism of pairing involves hydrogen bonding, which may be Watson-Crick, Hoogsteen or reversed Hoogsteen hydrogen bonding, between complementary nucleobases.

[0429] As used herein, “specifically hybridizes” means the ability of an oligomeric compound to hybridize to one nucleic acid site with greater affinity than it hybridizes to another nucleic acid site.

[0430] As used herein, “fully complementary” in reference to an oligonucleotide or portion thereof means that each nucleobase of the oligonucleotide or portion thereof is capable of pairing with a nucleobase of a complementary nucleic acid or contiguous portion thereof. Thus, a fully complementary region comprises no mismatches or unhybridized nucleobases in either strand.

[0431] As used herein, “percent complementarity” means the percentage of nucleobases of an oligomeric compound that are complementary to an equal-length portion of a target nucleic acid. Percent complementarity is calculated by dividing the number of nucleobases of the oligomeric compound that are complementary to nucleobases at corresponding positions in the target nucleic acid by the total length of the oligomeric compound.

[0432] As used herein, “percent identity” means the number of nucleobases in a first nucleic acid that are the same type (independent of chemical modification) as nucleobases at corresponding positions in a second nucleic acid, divided by the total number of nucleobases in the first nucleic acid.

[0433] As used herein, “modulation” means a change of amount or quality of a molecule, function, or activity when compared to the amount or quality of a molecule, function, or activity prior to modulation. For example, modulation includes the change, either an increase (stimulation or induction) or a decrease (inhibition or reduction) in gene expression. As a further example, modulation of expression can include a change in splice site selection of pre-mRNA processing, resulting in a change in the absolute or relative amount of a particular splice-variant compared to the amount in the absence of modulation.

[0434] As used herein, “chemical motif” means a pattern of chemical modifications in an oligonucleotide or a region thereof. Motifs may be defined by modifications at certain nucleosides and/or at certain linking groups of an oligonucleotide.

[0435] As used herein, “nucleoside motif” means a pattern of nucleoside modifications in an oligonucleotide or a region thereof. The linkages of such an oligonucleotide may be modified or unmodified. Unless otherwise indicated, motifs herein describing only nucleosides are intended to be nucleoside motifs. Thus, in such instances, the linkages are not limited.

[0436] As used herein, “sugar motif” means a pattern of sugar modifications in an oligonucleotide or a region thereof.

[0437] As used herein, “linkage motif” means a pattern of linkage modifications in an oligonucleotide or region thereof. The nucleosides of such an oligonucleotide may be modified or unmodified. Unless otherwise indicated, motifs herein describing only linkages are intended to be linkage motifs. Thus, in such instances, the nucleosides are not limited.

[0438] As used herein, “nucleobase modification motif” means a pattern of modifications to nucleobases along an oligonucleotide. Unless otherwise indicated, a nucleobase modification motif is independent of the nucleobase sequence.

[0439] As used herein, “sequence motif” means a pattern of nucleobases arranged along an oligonucleotide or portion thereof. Unless otherwise indicated, a sequence motif is independent of chemical modifications and thus may have any combination of chemical modifications, including no chemical modifications.

[0440] As used herein, “type of modification” in reference to a nucleoside or a nucleoside of a “type” means the chemical modification of a nucleoside and includes modified and unmodified nucleosides. Accordingly, unless otherwise indicated, a “nucleoside having a modification of a first type” may be an unmodified nucleoside.

[0441] As used herein, “differently modified” mean chemical modifications or chemical substituents that are different from one another, including absence of modifications. Thus, for example, a MOE nucleoside and an unmodified DNA nucleoside are “differently modified,” even though the DNA nucleoside is unmodified. Likewise, DNA and RNA are “differently modified,” even though both are naturally-occurring unmodified nucleosides. Nucleosides that are the same but for comprising different nucleobases are not differently modified. For example, a nucleoside comprising a 2′-OMe modified sugar and an unmodified adenine nucleobase and a nucleoside comprising a 2′-OMe modified sugar and an unmodified thymine nucleobase are not differently modified.

[0442] As used herein, “the same type of modifications” refers to modifications that are the same as one another, including absence of modifications. Thus, for example, two unmodified DNA nucleosides have “the same type of modification,” even though the DNA nucleoside is unmodified. Such nucleosides having the same type modification may comprise different nucleobases.

[0443] As used herein, “separate regions” means portions of an oligonucleotide wherein the chemical modifications or the motif of chemical modifications of any neighboring portions include at least one difference to allow the separate regions to be distinguished from one another.

[0444] As used herein, “pharmaceutically acceptable carrier or diluent” means any substance suitable for use in administering to an animal. In certain embodiments, a pharmaceutically acceptable carrier or diluent is sterile saline. In certain embodiments, such sterile saline is pharmaceutical grade saline.

[0445] As used herein the term “metabolic disorder” means a disease or condition principally characterized by dysregulation of metabolism—the complex set of chemical reactions associated with breakdown of food to produce energy.

[0446] As used herein, the term “cardiovascular disorder” means a disease or condition principally characterized by impaired function of the heart or blood vessels.

[0447] As used herein the term “mono or polycyclic ring system” is meant to include all ring systems selected from single or polycyclic radical ring systems wherein the rings are fused or linked and is meant to be inclusive of single and mixed ring systems individually selected from aliphatic, alicyclic, aryl, heteroaryl, aralkyl, arylalkyl, heterocyclic, heteroaryl, heteroaromatic and heteroarylalkyl. Such mono and poly cyclic structures can contain rings that each have the same level of saturation or each, independently, have varying degrees of saturation including fully saturated, partially saturated or fully unsaturated. Each ring can comprise ring atoms selected from C, N, O and S to give rise to heterocyclic rings as well as rings comprising only C ring atoms which can be present in a mixed motif such as for example benzimidazole wherein one ring has only carbon ring atoms and the fused ring has two nitrogen atoms. The mono or polycyclic ring system can be further substituted with substituent groups such as for example phthalimide which has two ═0 groups attached to one of the rings. Mono or polycyclic ring systems can be attached to parent molecules using various strategies such as directly through a ring atom, fused through multiple ring atoms, through a substituent group or through a bifunctional linking moiety.

[0448] As used herein, “prodrug” means an inactive or less active form of a compound which, when administered to a subject, is metabolized to form the active, or more active, compound (e.g., drug).

[0449] As used herein, “substituent” and “substituent group,” means an atom or group that replaces the atom or group of a named parent compound. For example a substituent of a modified nucleoside is any atom or group that differs from the atom or group found in a naturally occurring nucleoside (e.g., a modified 2′-substituent is any atom or group at the 2′-position of a nucleoside other than H or OH). Substituent groups can be protected or unprotected. In certain embodiments, compounds of the present disclosure have substituents at one or at more than one position of the parent compound. Substituents may also be further substituted with other substituent groups and may be attached directly or via a linking group such as an alkyl or hydrocarbyl group to a parent compound.

[0450] Likewise, as used herein, “substituent” in reference to a chemical functional group means an atom or group of atoms that differs from the atom or a group of atoms normally present in the named functional group. In certain embodiments, a substituent replaces a hydrogen atom of the functional group (e.g., in certain embodiments, the substituent of a substituted methyl group is an atom or group other than hydrogen which replaces one of the hydrogen atoms of an unsubstituted methyl group). Unless otherwise indicated, groups amenable for use as substituents include without limitation, halogen, hydroxyl, alkyl, alkenyl, alkynyl, acyl (—C(O)Rₐₐ), carboxyl (—C(O)O—Rₐₐ), aliphatic groups, alicyclic groups, alkoxy, substituted oxy (—O—Rₐₐ), aryl, aralkyl, heterocyclic radical, heteroaryl, heteroarylalkyl, amino (—N(R_{bb})(R_{cc})), imino(═NR_{bb}), amido (—C(O)N(R_{bb})(R_{cc}) or —N(R_{bb})C(O)Rₐₐ), azido (—N₃), nitro (—NO₂), cyano (—CN), carbamido (—OC(O)N(R_{bb})(R_{cc}) or —N(R_{bb})C(O)ORₐₐ), ureido (—N(R_{bb})C(O)N(R_{bb})(R_{cc})), thioureido (—N(R_{bb})C(S)N(R_{bb})—(R_{cc})), guanidinyl (—N(R_{bb})C(═NR_{bb})N(R_{bb})(R_{cc})), amidinyl (—C(═NR_{bb})N(R_{bb})(R_{cc}) or —N(R_{bb})C(═NR_{bb})(Rₐₐ)), thiol (—SR_{bb}), sulfinyl (—S(O)R_{bb}), sulfonyl (—S(O)₂R_{bb}) and sulfonamidyl (—S(O)₂N(R_{bb})(R_{cc}) or —N(R_{bb})S—(O)₂R_{bb}). Wherein each Rₐₐ, R_{bb} and R_{cc} is, independently, H, an optionally linked chemical functional group or a further substituent group with a preferred list including without limitation, alkyl, alkenyl, alkynyl, aliphatic, alkoxy, acyl, aryl, aralkyl, heteroaryl, alicyclic, heterocyclic and heteroarylalkyl. Selected substituents within the compounds described herein are present to a recursive degree.

[0451] As used herein, “alkyl,” as used herein, means a saturated straight or branched hydrocarbon radical containing up to twenty four carbon atoms. Examples of alkyl groups include without limitation, methyl, ethyl, propyl, butyl, isopropyl, n-hexyl, octyl, decyl, dodecyl and the like. Alkyl groups typically include from 1 to about 24 carbon atoms, more typically from 1 to about 12 carbon atoms (C₁-C₁₂ alkyl) with from 1 to about 6 carbon atoms being more preferred.

[0452] As used herein, “alkenyl,” means a straight or branched hydrocarbon chain radical containing up to twenty four carbon atoms and having at least one carbon-carbon double bond. Examples of alkenyl groups include without limitation, ethenyl, propenyl, butenyl, 1-methyl-2-buten-1-yl, dienes such as 1,3-butadiene and the like. Alkenyl groups typically include from 2 to about 24 carbon atoms, more typically from 2 to about 12 carbon atoms with from 2 to about 6 carbon atoms being more preferred. Alkenyl groups as used herein may optionally include one or more further substituent groups.

[0453] As used herein, “alkynyl,” means a straight or branched hydrocarbon radical containing up to twenty four carbon atoms and having at least one carbon-carbon triple bond. Examples of alkynyl groups include, without limitation, ethynyl, 1-propynyl, 1-butynyl, and the like. Alkynyl groups typically include from 2 to about 24 carbon atoms, more typically from 2 to about 12 carbon atoms with from 2 to about 6 carbon atoms being more preferred. Alkynyl groups as used herein may optionally include one or more further substituent groups.

[0454] As used herein, “acyl,” means a radical formed by removal of a hydroxyl group from an organic acid and has the general Formula —C(O)—X where X is typically aliphatic, alicyclic or aromatic. Examples include aliphatic carbonyls, aromatic carbonyls, aliphatic sulfonyls, aromatic sulfinyls, aliphatic sulfinyls, aromatic phosphates, aliphatic phosphates and the like. Acyl groups as used herein may optionally include further substituent groups.

[0455] As used herein, “alicyclic” means a cyclic ring system wherein the ring is aliphatic. The ring system can comprise one or more rings wherein at least one ring is aliphatic. Preferred alicyclics include rings having from about 5 to about 9 carbon atoms in the ring. Alicyclic as used herein may optionally include further substituent groups.

[0456] As used herein, “aliphatic” means a straight or branched hydrocarbon radical containing up to twenty four carbon atoms wherein the saturation between any two carbon atoms is a single, double or triple bond. An aliphatic group preferably contains from 1 to about 24 carbon atoms, more typically from 1 to about 12 carbon atoms with from 1 to about 6 carbon atoms being more preferred. The straight or branched chain of an aliphatic group may be interrupted with one or more heteroatoms that include nitrogen, oxygen, sulfur and phosphorus. Such aliphatic groups interrupted by heteroatoms include without limitation, polyalkoxys, such as polyalkylene glycols, polyamines, and polyimines. Aliphatic groups as used herein may optionally include further substituent groups.

[0457] As used herein, “alkoxy” means a radical formed between an alkyl group and an oxygen atom wherein the oxygen atom is used to attach the alkoxy group to a parent molecule. Examples of alkoxy groups include without limitation, methoxy, ethoxy, propoxy, isopropoxy, n-butoxy, sec-butoxy, tert-butoxy, n-pentoxy, neopentoxy, n-hexoxy and the like. Alkoxy groups as used herein may optionally include further substituent groups.

[0458] As used herein, “aminoalkyl” means an amino substituted C₁-C₁₂ alkyl radical. The alkyl portion of the radical forms a covalent bond with a parent molecule. The amino group can be located at any position and the aminoalkyl group can be substituted with a further substituent group at the alkyl and/or amino portions.

[0459] As used herein, “aralkyl” and “arylalkyl” mean an aromatic group that is covalently linked to a C₁-C₁₂ alkyl radical. The alkyl radical portion of the resulting aralkyl (or arylalkyl) group forms a covalent bond with a parent molecule. Examples include without limitation, benzyl, phenethyl and the like. Aralkyl groups as used herein may optionally include further substituent groups attached to the alkyl, the aryl or both groups that form the radical group.

[0460] As used herein, “aryl” and “aromatic” mean a mono- or polycyclic carbocyclic ring system radicals having one or more aromatic rings. Examples of aryl groups include without limitation, phenyl, naphthyl, tetrahydronaphthyl, indanyl, idenyl and the like. Preferred aryl ring systems have from about 5 to about 20 carbon atoms in one or more rings. Aryl groups as used herein may optionally include further substituent groups.

[0461] As used herein, “halo” and “halogen,” mean an atom selected from fluorine, chlorine, bromine and iodine.

[0462] As used herein, “heteroaryl,” and “heteroaromatic,” mean a radical comprising a mono- or polycyclic aromatic ring, ring system or fused ring system wherein at least one of the rings is aromatic and includes one or more heteroatoms. Heteroaryl is also meant to include fused ring systems including systems where one or more of the fused rings contain no heteroatoms. Heteroaryl groups typically include one ring atom selected from sulfur, nitrogen or oxygen. Examples of heteroaryl groups include without limitation, pyridinyl, pyrazinyl, pyrimidinyl, pyrrolyl, pyrazolyl, imidazolyl, thiazolyl, oxazolyl, isooxazolyl, thiadiazolyl, oxadiazolyl, thiophenyl, furanyl, quinolinyl, isoquinolinyl, benzimidazolyl, benzooxazolyl, quinoxalinyl and the like. Heteroaryl radicals can be attached to a parent molecule directly or through a linking moiety such as an aliphatic group or hetero atom. Heteroaryl groups as used herein may optionally include further substituent groups.

[0463] As used herein, “conjugate compound” means any atoms, group of atoms, or group of linked atoms suitable for use as a conjugate group. In certain embodiments, conjugate compounds may possess or impart one or more properties, including, but not limited to pharmacodynamic, pharmacokinetic, binding, absorption, cellular distribution, cellular uptake, charge and/or clearance properties.

[0464] As used herein, unless otherwise indicated or modified, the term “double-stranded” refers to two separate oligomeric compounds that are hybridized to one another. Such double stranded compounds may have one or more or non-hybridizing nucleosides at one or both ends of one or both strands (overhangs) and/or one or more internal non-hybridizing nucleosides (mismatches) provided there is sufficient complementarity to maintain hybridization under physiologically relevant conditions.

### Certain Compounds

[0465] In certain embodiments, the invention provides conjugated antisense compounds comprising antisense oligonucleotides and a conjugate.

### Certain Antisense Oligonucleotides

[0466] In certain embodiments, the invention provides antisense oligonucleotides. Such antisense oligonucleotides comprise linked nucleosides, each nucleoside comprising a sugar moiety and a nucleobase. The structure of such antisense oligonucleotides may be considered in terms of chemical features (e.g., modifications and patterns of modifications) and nucleobase sequence (e.g., sequence of antisense oligonucleotide, identity and sequence of target nucleic acid).

### Certain Chemistry Features

[0467] In certain embodiments, antisense oligonucleotide comprise one or more modification. In certain such embodiments, antisense oligonucleotides comprise one or more modified nucleosides and/or modified internucleoside linkages. In certain embodiments, modified nucleosides comprise a modified sugar moiety and/or modified nucleobase.

### Certain Sugar Moieties

[0468] In certain embodiments, compounds of the disclosure comprise one or more modified nucleosides comprising a modified sugar moiety. Such compounds comprising one or more sugar-modified nucleosides may have desirable properties, such as enhanced nuclease stability or increased binding affinity with a target nucleic acid relative to an oligonucleotide comprising only nucleosides comprising naturally occurring sugar moieties. In certain embodiments, modified sugar moieties are substituted sugar moieties. In certain embodiments, modified sugar moieties are sugar surrogates. Such sugar surrogates may comprise one or more substitutions corresponding to those of substituted sugar moieties.

[0469] In certain embodiments, modified sugar moieties are substituted sugar moieties comprising one or more non-bridging sugar substituent, including but not limited to substituents at the 2′ and/or 5′ positions. Examples of sugar substituents suitable for the 2′-position, include, but are not limited to: 2′-F, 2′-OCH₃ (“OMe” or “O-methyl”), and 2′-O(CH₂)₂OCH₃ (“MOE”). In certain embodiments, sugar substituents at the 2′ position is selected from allyl, amino, azido, thio, O-allyl, O—C₁-C₁₀ alkyl, O—C₁-C₁₀ substituted alkyl; OCF₃, O(CH₂)₂SCH₃, O(CH₂)₂—O—N(Rm)(Rn), and O—CH₂—C(═O)—N(Rm)(Rn), where each Rm and Rn is, independently, H or substituted or unsubstituted C₁-C₁₀ alkyl. Examples of sugar substituents at the 5′-position, include, but are not limited to: 5′-methyl (R or S); 5′-vinyl, and 5′-methoxy. In certain embodiments, substituted sugars comprise more than one non-bridging sugar substituent, for example, 2′-F-5′-methyl sugar moieties (see, e.g., PCT International Application WO 2008/101157, for additional 5′, 2′-bis substituted sugar moieties and nucleosides).

[0470] Nucleosides comprising 2′-substituted sugar moieties are referred to as 2′-substituted nucleosides. In certain embodiments, a 2′-substituted nucleoside comprises a 2′-substituent group selected from halo, allyl, amino, azido, SH, CN, OCN, CF₃, OCF₃, O, S, or N(Rₘ)-alkyl; O, S, or N(Rₘ)-alkenyl; O, S or N(Rₘ)-alkynyl; O-alkylenyl-O-alkyl, alkynyl, alkaryl, aralkyl, O-alkaryl, O-aralkyl, O(CH₂)₂SCH₃, O—(CH₂)₂—O—N(Rₘ)(Rₙ) or O—CH₂—C(═O)—N(Rₘ)(Rₙ), where each Rₘ and Rₙ is, independently, H, an amino protecting group or substituted or unsubstituted C₁-C₁₀ alkyl. These 2′-substituent groups can be further substituted with one or more substituent groups independently selected from hydroxyl, amino, alkoxy, carboxy, benzyl, phenyl, nitro (NO₂), thiol, thioalkoxy (S-alkyl), halogen, alkyl, aryl, alkenyl and alkynyl.

[0471] In certain embodiments, a 2′-substituted nucleoside comprises a 2′-substituent group selected from F, NH₂, N₃, OCF₃, O—CH₃, O(CH₂)₃NH₂, CH₂—CH═CH₂, O—CH₂—CH═CH₂, OCH₂CH₂OCH₃, O(CH₂)₂SCH₃, O—(CH₂)₂—O—N(Rₘ)(Rₙ), O(CH₂)₂O(CH₂)₂N(CH₃)₂, and N-substituted acetamide (O—CH₂—C(═O)—N(Rₘ)(Rₙ) where each Rₘ and Rₙ is, independently, H, an amino protecting group or substituted or unsubstituted C₁-C₁₀ alkyl.

[0472] In certain embodiments, a 2′-substituted nucleoside comprises a sugar moiety comprising a 2′-substituent group selected from F, OCF₃, O—CH₃, OCH₂CH₂OCH₃, O(CH₂)₂SCH₃, O—(CH₂)₂—O—N(CH₃)₂, —O(CH₂)₂O(CH₂)₂N(CH₃)₂, and O—CH₂—C(═O)—N(H)CH₃.

[0473] In certain embodiments, a 2′-substituted nucleoside comprises a sugar moiety comprising a 2′-substituent group selected from F, O—CH₃, and OCH₂CH₂OCH₃.

[0474] Certain modified sugar moieties comprise a bridging sugar substituent that forms a second ring resulting in a bicyclic sugar moiety. In certain such embodiments, the bicyclic sugar moiety comprises a bridge between the 4′ and the 2′ furanose ring atoms. Examples of such 4′ to 2′ sugar substituents, include, but are not limited to: —[C(Rₐ)(R_{b})]ₙ—, —[C(Rₐ)(R_{b})]ₙ—O—, —C(RₐR_{b})—N(R)—O— or, —C(RₐR_{b})—O—N(R)—; 4′-CH₂-2′, 4′-(CH₂)₂-2′, 4′-(CH₂)₃-2′, 4′-(CH₂)—O-2′ (LNA); 4′-(CH₂)—S-2′; 4′-(CH₂)₂—O-2′ (ENA); 4′-CH(CH₃)—O-2′ (cEt) and 4′-CH(CH₂OCH₃)—O-2′, and analogs thereof (see, e.g., U.S. Pat. No. 7,399,845, issued on Jul. 15, 2008); 4′-C(CH₃)(CH₃)—O-2′ and analogs thereof, (see, e.g., WO2009/006478, published Jan. 8, 2009); 4′-CH₂—N(OCH₃)-2′ and analogs thereof (see, e.g., WO2008/150729, published Dec. 11, 2008); 4′-CH₂—O—N(CH₃)-2′ (see, e.g., US2004/0171570, published Sep. 2, 2004); 4′-CH₂—O—N(R)-2′, and 4′-CH₂—N(R)—O-2′-, wherein each R is, independently, H, a protecting group, or C₁-C₁₂ alkyl; 4′-CH₂—N(R)—O-2′, wherein R is H, C₁-C₁₂ alkyl, or a protecting group (see, U.S. Pat. No. 7,427,672, issued on Sep. 23, 2008); 4′-CH₂—C(H)(CH₃)-2′ (see, e.g., Chattopadhyaya, et al., J. Org. Chem., 2009, 74, 118-134); and 4′-CH₂—C(═CH₂)-2′ and analogs thereof (see, published PCT International Application WO 2008/154401, published on Dec. 8, 2008).

[0475] In certain embodiments, such 4′ to 2′ bridges independently comprise from 1 to 4 linked groups independently selected from —[C(Rₐ)(R_{b})]ₙ—, —C(Rₐ)═C(R_{b})—, —C(Rₐ)═N—, —C(═NRₐ)—, —C(═O)—, —C(═S)—, —O—, —Si(Rₐ)₂—, —S(═O)X—, and —N(Rₐ)—;

[0476] wherein:

[0477] x is 0, 1, or 2;

[0478] n is 1, 2, 3, or 4;

[0479] each Rₐ and R_{b} is, independently, H, a protecting group, hydroxyl, C₁-C₁₂ alkyl, substituted C₁-C₁₂ alkyl, C₂-C₁₂ alkenyl, substituted C₂-C₁₂ alkenyl, C₂-C₁₂ alkynyl, substituted C₂-C₁₂ alkynyl, C₅-C₂₀ aryl, substituted C₅-C₂₀ aryl, heterocycle radical, substituted heterocycle radical, heteroaryl, substituted heteroaryl, C₅-C₇ alicyclic radical, substituted C₅-C₇ alicyclic radical, halogen, OJ₁, NJ₁J₂, SJ₁, N₃, COOJ₁, acyl (C(═O)—H), substituted acyl, CN, sulfonyl (S(═O)₂-J₁), or sulfoxyl (S(═O)-J₁); and

[0480] each J₁ and J₂ is, independently, H, C₁-C₁₂ alkyl, substituted C₁-C₁₂ alkyl, C₂-C₁₂ alkenyl, substituted C₂-C₁₂ alkenyl, C₂-C₁₂ alkynyl, substituted C₂-C₁₂ alkynyl, C₅-C₂₀ aryl, substituted C₅-C₂₀ aryl, acyl (C(═O)—H), substituted acyl, a heterocycle radical, a substituted heterocycle radical, C₁-C₁₂ aminoalkyl, substituted C₁-C₁₂ aminoalkyl, or a protecting group.

[0481] Nucleosides comprising bicyclic sugar moieties are referred to as bicyclic nucleosides or BNAs. Bicyclic nucleosides include, but are not limited to, (A) α-L-Methyleneoxy (4′-CH₂—O-2′) BNA, (B) β-D-Methyleneoxy (4′-CH₂—O-2′) BNA (also referred to as locked nucleic acid or LNA), (C) Ethyleneoxy (4′-(CH₂)₂—O-2′) BNA, (D) Aminooxy (4′-CH₂—O—N(R)-2′) BNA, (E) Oxyamino (4′-CH₂—N(R)—O-2′) BNA, (F) Methyl(methyleneoxy) (4′-CH(CH₃)—O-2′) BNA (also referred to as constrained ethyl or cEt), (G) methylene-thio (4′-CH₂—S-2′) BNA, (H) methylene-amino (4′-CH₂—N(R)-2′) BNA, (I) methyl carbocyclic (4′-CH₂—CH(CH₃)-2′) BNA, and (J) propylene carbocyclic (4′-(CH₂)₃-2′) BNA as depicted below.

[chemical structure]

[chemical structure]

wherein Bx is a nucleobase moiety and R is, independently, H, a protecting group, or C₁-C₁₂ alkyl.

[0482] Additional bicyclic sugar moieties are known in the art, for example: Singh et al., Chem. Commun., 1998, 4, 455-456; Koshkin et al., Tetrahedron, 1998, 54, 3607-3630; Wahlestedt et al., Proc. Natl. Acad. Sci. U.S.A, 2000, 97, 5633-5638; Kumar et al., Bioorg. Med. Chem. Lett., 1998, 8, 2219-2222; Singh et al., J. Org. Chem., 1998, 63, 10035-10039; Srivastava et al., J. Am. Chem. Soc., 129(26) 8362-8379 (Jul. 4, 2007); Elayadi et al., Curr. Opinion Invens. Drugs, 2001, 2, 558-561; Braasch et al., Chem. Biol., 2001, 8, 1-7; Orum et al., Curr. Opinion Mol. Ther., 2001, 3, 239-243; U.S. Pat. Nos. 7,053,207, 6,268,490, 6,770,748, 6,794,499, 7,034,133, 6,525,191, 6,670,461, and 7,399,845; WO 2004/106356, WO 1994/14226, WO 2005/021570, and WO 2007/134181; U.S. Patent Publication Nos. US2004/0171570, US2007/0287831, and US2008/0039618; U.S. patent Ser. Nos. 12/129,154, 60/989,574, 61/026,995, 61/026,998, 61/056,564, 61/086,231, 61/097,787, and 61/099,844; and PCT International Applications Nos. PCT/US2008/064591, PCT/US2008/066154, and PCT/US2008/068922.

[0483] In certain embodiments, bicyclic sugar moieties and nucleosides incorporating such bicyclic sugar moieties are further defined by isomeric configuration. For example, a nucleoside comprising a 4′-2′ methylene-oxy bridge, may be in the α-L configuration or in the β-D configuration. Previously, α-L-methyleneoxy (4′-CH₂—O-2′) bicyclic nucleosides have been incorporated into antisense oligonucleotides that showed antisense activity (Frieden et al., Nucleic Acids Research, 2003, 21, 6365-6372).

[0484] In certain embodiments, substituted sugar moieties comprise one or more non-bridging sugar substituent and one or more bridging sugar substituent (e.g., 5′-substituted and 4′-2′ bridged sugars). (see, PCT International Application WO 2007/134181, published on Nov. 22, 2007, wherein LNA is substituted with, for example, a 5′-methyl or a 5′-vinyl group).

[0485] In certain embodiments, modified sugar moieties are sugar surrogates. In certain such embodiments, the oxygen atom of the naturally occurring sugar is substituted, e.g., with a sulfur, carbon or nitrogen atom. In certain such embodiments, such modified sugar moiety also comprises bridging and/or non-bridging substituents as described above. For example, certain sugar surrogates comprise a 4′-sulfur atom and a substitution at the 2′-position (see, e.g., published U.S. Patent Application US2005/0130923, published on Jun. 16, 2005) and/or the 5′ position. By way of additional example, carbocyclic bicyclic nucleosides having a 4′-2′ bridge have been described (see, e.g., Freier et al., Nucleic Acids Research, 1997, 25(22), 4429-4443 and Albaek et al., J. Org. Chem., 2006, 71, 7731-7740).

[0486] In certain embodiments, sugar surrogates comprise rings having other than 5-atoms. For example, in certain embodiments, a sugar surrogate comprises a morpholino. Morpholino compounds and their use in oligomeric compounds has been reported in numerous patents and published articles (see for example: Braasch et al., Biochemistry, 2002, 41, 4503-4510; and U.S. Pat. Nos. 5,698,685; 5,166,315; 5,185,444; and 5,034,506). As used here, the term “morpholino” means a sugar surrogate having the following structure:

[chemical structure]

[0487] In certain embodiments, morpholinos may be modified, for example by adding or altering various substituent groups from the above morpholino structure. Such sugar surrogates are referred to herein as “modified morpholinos.”

[0488] For another example, in certain embodiments, a sugar surrogate comprises a six-membered tetrahydropyran. Such tetrahydropyrans may be further modified or substituted. Nucleosides comprising such modified tetrahydropyrans include, but are not limited to, hexitol nucleic acid (HNA), anitol nucleic acid (ANA), manitol nucleic acid (MNA) (see Leumann, C J. Bioorg. & Med. Chem. (2002) 10:841-854), fluoro HNA (F-HNA), and those compounds having Formula VI:

[chemical structure]

wherein independently for each of said at least one tetrahydropyran nucleoside analog of Formula VI:

[0489] Bx is a nucleobase moiety;

[0490] T₃ and T₄ are each, independently, an internucleoside linking group linking the tetrahydropyran nucleoside analog to the antisense compound or one of T₃ and T₄ is an internucleoside linking group linking the tetrahydropyran nucleoside analog to the antisense compound and the other of T₃ and T₄ is H, a hydroxyl protecting group, a linked conjugate group, or a 5′ or 3′-terminal group;

[0491] q₁, q₂, q₃, q₄, q₅, q₆ and q₇ are each, independently, H, C₁-C₆ alkyl, substituted C₁-C₆ alkyl, C₂-C₆ alkenyl, substituted C₂-C₆ alkenyl, C₂-C₆ alkynyl, or substituted C₂-C₆ alkynyl; and

[0492] each of R₁ and R₂ is independently selected from among: hydrogen, halogen, substituted or unsubstituted alkoxy, NJ₁J₂, SJ₁, N₃, OC(═X)J₁, OC(═X)NJ₁J₂, NJ₃C(═X)NJ₁J₂, and CN, wherein X is O, S or NJ₁, and each J₁, J₂, and J₃ is, independently, H or C₁-C₆ alkyl.

[0493] In certain embodiments, the modified THP nucleosides of Formula VI are provided wherein q₁, q₂, q₃, q₄, q₅, q₆ and q₇ are each H. In certain embodiments, at least one of q₁, q₂, q₃, q₄, q₅, q₆ and q₇ is other than H. In certain embodiments, at least one of q₁, q₂, q₃, q₄, q₅, q₆ and q₇ is methyl. In certain embodiments, THP nucleosides of Formula VI are provided wherein one of R₁ and R₂ is F. In certain embodiments, R₁ is fluoro and R₂ is H, R₁ is methoxy and R₂ is H, and R₁ is methoxyethoxy and R₂ is H.

[0494] Many other bicyclo and tricyclo sugar surrogate ring systems are also known in the art that can be used to modify nucleosides for incorporation into antisense compounds (see, e.g., review article: Leumann, J. C, Bioorganic & Medicinal Chemistry, 2002, 10, 841-854).

[0495] Combinations of modifications are also provided without limitation, such as 2′-F-5′-methyl substituted nucleosides (see PCT International Application WO 2008/101157 Published on Aug. 21, 2008 for other disclosed 5′, 2′-bis substituted nucleosides) and replacement of the ribosyl ring oxygen atom with S and further substitution at the 2′-position (see published U.S. Patent Application US2005-0130923, published on Jun. 16, 2005) or alternatively 5′-substitution of a bicyclic nucleic acid (see PCT International Application WO 2007/134181, published on Nov. 22, 2007 wherein a 4′-CH₂—O-2′ bicyclic nucleoside is further substituted at the 5′ position with a 5′-methyl or a 5′-vinyl group). The synthesis and preparation of carbocyclic bicyclic nucleosides along with their oligomerization and biochemical studies have also been described (see, e.g., Srivastava et al., J. Am. Chem. Soc. 2007, 129(26), 8362-8379).

[0496] In certain embodiments, the present disclosure provides oligonucleotides comprising modified nucleosides. Those modified nucleotides may include modified sugars, modified nucleobases, and/or modified linkages. The specific modifications are selected such that the resulting oligonucleotides possess desirable characteristics. In certain embodiments, oligonucleotides comprise one or more RNA-like nucleosides. In certain embodiments, oligonucleotides comprise one or more DNA-like nucleotides.

### Certain Nucleobase Modifications

[0497] In certain embodiments, nucleosides of the present disclosure comprise one or more unmodified nucleobases. In certain embodiments, nucleosides of the present disclosure comprise one or more modified nucleobases.

[0498] In certain embodiments, modified nucleobases are selected from: universal bases, hydrophobic bases, promiscuous bases, size-expanded bases, and fluorinated bases as defined herein. 5-substituted pyrimidines, 6-azapyrimidines and N-2, N-6 and O-6 substituted purines, including 2-aminopropyladenine, 5-propynyluracil; 5-propynylcytosine; 5-hydroxymethyl cytosine, xanthine, hypoxanthine, 2-aminoadenine, 6-methyl and other alkyl derivatives of adenine and guanine, 2-propyl and other alkyl derivatives of adenine and guanine, 2-thiouracil, 2-thiothymine and 2-thiocytosine, 5-halouracil and cytosine, 5-propynyl (—C≡C—CH₃) uracil and cytosine and other alkynyl derivatives of pyrimidine bases, 6-azo uracil, cytosine and thymine, 5-uracil (pseudouracil), 4-thiouracil, 8-halo, 8-amino, 8-thiol, 8-thioalkyl, 8-hydroxyl and other 8-substituted adenines and guanines, 5-halo particularly 5-bromo, 5-trifluoromethyl and other 5-substituted uracils and cytosines, 7-methylguanine and 7-methyladenine, 2-F-adenine, 2-amino-adenine, 8-azaguanine and 8-azaadenine, 7-deazaguanine and 7-deazaadenine, 3-deazaguanine and 3-deazaadenine, universal bases, hydrophobic bases, promiscuous bases, size-expanded bases, and fluorinated bases as defined herein. Further modified nucleobases include tricyclic pyrimidines such as phenoxazine cytidine([5,4-b][1,4]benzoxazin-2(3H)-one), phenothiazine cytidine (1H-pyrimido[5,4-b][1,4]benzothiazin-2(3H)-one), G-clamps such as a substituted phenoxazine cytidine (e.g. 9-(2-aminoethoxy)-H-pyrimido[5,4-b][1,4]benzoxazin-2(3H)-one), carbazole cytidine (2H-pyrimido[4,5-b]indol-2-one), pyridoindole cytidine (H-pyrido[3′,2′:4,5]pyrrolo[2,3-d]pyrimidin-2-one). Modified nucleobases may also include those in which the purine or pyrimidine base is replaced with other heterocycles, for example 7-deaza-adenine, 7-deazaguanosine, 2-aminopyridine and 2-pyridone. Further nucleobases include those disclosed in U.S. Pat. No. 3,687,808, those disclosed in The Concise Encyclopedia Of Polymer Science And Engineering, Kroschwitz, J. I., Ed., John Wiley & Sons, 1990, 858-859; those disclosed by Englisch et al., Angewandte Chemie, International Edition, 1991, 30, 613; and those disclosed by Sanghvi, Y. S., Chapter 15, Antisense Research and Applications, Crooke, S. T. and Lebleu, B., Eds., CRC Press, 1993, 273-288.

[0499] Representative United States patents that teach the preparation of certain of the above noted modified nucleobases as well as other modified nucleobases include without limitation, U.S. Pat. Nos. 3,687,808; 4,845,205; 5,130,302; 5,134,066; 5,175,273; 5,367,066; 5,432,272; 5,457,187; 5,459,255; 5,484,908; 5,502,177; 5,525,711; 5,552,540; 5,587,469; 5,594,121; 5,596,091; 5,614,617; 5,645,985; 5,681,941; 5,750,692; 5,763,588; 5,830,653 and 6,005,096, certain of which are commonly owned with the instant application, and each of which is herein incorporated by reference in its entirety.

### Certain Internucleoside Linkages

[0500] In certain embodiments, the present disclosure provides oligonucleotides comprising linked nucleosides. In such embodiments, nucleosides may be linked together using any internucleoside linkage. The two main classes of internucleoside linking groups are defined by the presence or absence of a phosphorus atom. Representative phosphorus containing internucleoside linkages include, but are not limited to, phosphodiesters (PO), phosphotriesters, methylphosphonates, phosphoramidate, and phosphorothioates (PS). Representative non-phosphorus containing internucleoside linking groups include, but are not limited to, methylenemethylimino (—CH₂—N(CH₃)—O—CH₂—), thiodiester (—O—C(O)—S—), thionocarbamate (—O—C(O)(NH)—S—); siloxane (—O—Si(H)₂—O—); and N,N′-dimethylhydrazine (—CH₂—N(CH₃)—N(CH₃)—). Modified linkages, compared to natural phosphodiester linkages, can be used to alter, typically increase, nuclease resistance of the oligonucleotide. In certain embodiments, internucleoside linkages having a chiral atom can be prepared as a racemic mixture, or as separate enantiomers. Representative chiral linkages include, but are not limited to, alkylphosphonates and phosphorothioates. Methods of preparation of phosphorous-containing and non-phosphorous-containing internucleoside linkages are well known to those skilled in the art.

[0501] The oligonucleotides described herein contain one or more asymmetric centers and thus give rise to enantiomers, diastereomers, and other stereoisomeric configurations that may be defined, in terms of absolute stereochemistry, as (R) or (S), □ or □ such as for sugar anomers, or as (D) or (L) such as for amino acids etc. Included in the antisense compounds provided herein are all such possible isomers, as well as their racemic and optically pure forms.

[0502] Neutral internucleoside linkages include without limitation, phosphotriesters, methylphosphonates, MMI (3′-CH₂—N(CH₃)—O-5′), amide-3 (3′-CH₂—C(═O)—N(H)-5′), amide-4 (3′-CH₂—N(H)—C(═O)-5′), formacetal (3′-O—CH₂—O-5′), and thioformacetal (3′-S—CH₂—O-5′). Further neutral internucleoside linkages include nonionic linkages comprising siloxane (dialkylsiloxane), carboxylate ester, carboxamide, sulfide, sulfonate ester and amides (See for example: Carbohydrate Modifications in Antisense Research; Y. S. Sanghvi and P. D. Cook, Eds., ACS Symposium Series 580; Chapters 3 and 4, 40-65). Further neutral internucleoside linkages include nonionic linkages comprising mixed N, O, S and CH₂ component parts.

### Certain Motifs

[0503] In certain embodiments, antisense oligonucleotides comprise one or more modified nucleoside (e.g., nucleoside comprising a modified sugar and/or modified nucleobase) and/or one or more modified internucleoside linkage. The pattern of such modifications on an oligonucleotide is referred to herein as a motif. In certain embodiments, sugar, nucleobase, and linkage motifs are independent of one another.

### Certain Sugar Motifs

[0504] In certain embodiments, oligonucleotides comprise one or more type of modified sugar moieties and/or naturally occurring sugar moieties arranged along an oligonucleotide or region thereof in a defined pattern or sugar modification motif. Such motifs may include any of the sugar modifications discussed herein and/or other known sugar modifications.

[0505] In certain embodiments, the oligonucleotides comprise or consist of a region having a gapmer sugar motif, which comprises two external regions or “wings” and a central or internal region or “gap.” The three regions of a gapmer sugar motif (the 5′-wing, the gap, and the 3′-wing) form a contiguous sequence of nucleosides wherein at least some of the sugar moieties of the nucleosides of each of the wings differ from at least some of the sugar moieties of the nucleosides of the gap. Specifically, at least the sugar moieties of the nucleosides of each wing that are closest to the gap (the 3′-most nucleoside of the 5′-wing and the 5′-most nucleoside of the 3′-wing) differ from the sugar moiety of the neighboring gap nucleosides, thus defining the boundary between the wings and the gap. In certain embodiments, the sugar moieties within the gap are the same as one another. In certain embodiments, the gap includes one or more nucleoside having a sugar moiety that differs from the sugar moiety of one or more other nucleosides of the gap. In certain embodiments, the sugar motifs of the two wings are the same as one another (symmetric sugar gapmer). In certain embodiments, the sugar motifs of the 5′-wing differs from the sugar motif of the 3′-wing (asymmetric sugar gapmer).

### Certain 5′-Wings

[0506] In certain embodiments, the 5′-wing of a gapmer consists of 1 to 8 linked nucleosides. In certain embodiments, the 5′-wing of a gapmer consists of 1 to 7 linked nucleosides. In certain embodiments, the 5′-wing of a gapmer consists of 1 to 6 linked nucleosides. In certain embodiments, the 5′-wing of a gapmer consists of 1 to 5 linked nucleosides. In certain embodiments, the 5′-wing of a gapmer consists of 2 to 5 linked nucleosides. In certain embodiments, the 5′-wing of a gapmer consists of 3 to 5 linked nucleosides. In certain embodiments, the 5′-wing of a gapmer consists of 4 or 5 linked nucleosides. In certain embodiments, the 5′-wing of a gapmer consists of 1 to 4 linked nucleosides. In certain embodiments, the 5′-wing of a gapmer consists of 1 to 3 linked nucleosides. In certain embodiments, the 5′-wing of a gapmer consists of 1 or 2 linked nucleosides. In certain embodiments, the 5′-wing of a gapmer consists of 2 to 4 linked nucleosides. In certain embodiments, the 5′-wing of a gapmer consists of 2 or 3 linked nucleosides. In certain embodiments, the 5′-wing of a gapmer consists of 3 or 4 linked nucleosides. In certain embodiments, the 5′-wing of a gapmer consists of 1 nucleoside. In certain embodiments, the 5′-wing of a gapmer consists of 2 linked nucleosides. In certain embodiments, the 5′-wing of a gapmer consists of 3 linked nucleosides. In certain embodiments, the 5′-wing of a gapmer consists of 4 linked nucleosides. In certain embodiments, the 5′-wing of a gapmer consists of 5 linked nucleosides. In certain embodiments, the 5′-wing of a gapmer consists of 6 linked nucleosides.

[0507] In certain embodiments, the 5′-wing of a gapmer comprises at least one bicyclic nucleoside. In certain embodiments, the 5′-wing of a gapmer comprises at least two bicyclic nucleosides. In certain embodiments, the 5′-wing of a gapmer comprises at least three bicyclic nucleosides. In certain embodiments, the 5′-wing of a gapmer comprises at least four bicyclic nucleosides. In certain embodiments, the 5′-wing of a gapmer comprises at least one constrained ethyl nucleoside. In certain embodiments, the 5′-wing of a gapmer comprises at least one LNA nucleoside. In certain embodiments, each nucleoside of the 5′-wing of a gapmer is a bicyclic nucleoside. In certain embodiments, each nucleoside of the 5′-wing of a gapmer is a constrained ethyl nucleoside. In certain embodiments, each nucleoside of the 5′-wing of a gapmer is a LNA nucleoside.

[0508] In certain embodiments, the 5′-wing of a gapmer comprises at least one non-bicyclic modified nucleoside. In certain embodiments, the 5′-wing of a gapmer comprises at least one 2′-substituted nucleoside. In certain embodiments, the 5′-wing of a gapmer comprises at least one 2′-MOE nucleoside. In certain embodiments, the 5′-wing of a gapmer comprises at least one 2′-OMe nucleoside. In certain embodiments, each nucleoside of the 5′-wing of a gapmer is a non-bicyclic modified nucleoside. In certain embodiments, each nucleoside of the 5′-wing of a gapmer is a 2′-substituted nucleoside. In certain embodiments, each nucleoside of the 5′-wing of a gapmer is a 2′-MOE nucleoside. In certain embodiments, each nucleoside of the 5′-wing of a gapmer is a 2′-OMe nucleoside.

[0509] In certain embodiments, the 5′-wing of a gapmer comprises at least one 2′-deoxynucleoside. In certain embodiments, each nucleoside of the 5′-wing of a gapmer is a 2′-deoxynucleoside. In a certain embodiments, the 5′-wing of a gapmer comprises at least one ribonucleoside. In certain embodiments, each nucleoside of the 5′-wing of a gapmer is a ribonucleoside. In certain embodiments, one, more than one, or each of the nucleosides of the 5′-wing is an RNA-like nucleoside.

[0510] In certain embodiments, the 5′-wing of a gapmer comprises at least one bicyclic nucleoside and at least one non-bicyclic modified nucleoside. In certain embodiments, the 5′-wing of a gapmer comprises at least one bicyclic nucleoside and at least one 2′-substituted nucleoside. In certain embodiments, the 5′-wing of a gapmer comprises at least one bicyclic nucleoside and at least one 2′-MOE nucleoside. In certain embodiments, the 5′-wing of a gapmer comprises at least one bicyclic nucleoside and at least one 2′-OMe nucleoside. In certain embodiments, the 5′-wing of a gapmer comprises at least one bicyclic nucleoside and at least one 2′-deoxynucleoside.

[0511] In certain embodiments, the 5′-wing of a gapmer comprises at least one constrained ethyl nucleoside and at least one non-bicyclic modified nucleoside. In certain embodiments, the 5′-wing of a gapmer comprises at least one constrained ethyl nucleoside and at least one 2′-substituted nucleoside. In certain embodiments, the 5′-wing of a gapmer comprises at least one constrained ethyl nucleoside and at least one 2′-MOE nucleoside. In certain embodiments, the 5′-wing of a gapmer comprises at least one constrained ethyl nucleoside and at least one 2′-OMe nucleoside. In certain embodiments, the 5′-wing of a gapmer comprises at least one constrained ethyl nucleoside and at least one 2′-deoxynucleoside.

### Certain 3′-Wings

[0512] In certain embodiments, the 3′-wing of a gapmer consists of 1 to 8 linked nucleosides. In certain embodiments, the 3′-wing of a gapmer consists of 1 to 7 linked nucleosides. In certain embodiments, the 3′-wing of a gapmer consists of 1 to 6 linked nucleosides. In certain embodiments, the 3′-wing of a gapmer consists of 1 to 5 linked nucleosides. In certain embodiments, the 3′-wing of a gapmer consists of 2 to 5 linked nucleosides. In certain embodiments, the 3′-wing of a gapmer consists of 3 to 5 linked nucleosides. In certain embodiments, the 3′-wing of a gapmer consists of 4 or 5 linked nucleosides. In certain embodiments, the 3′-wing of a gapmer consists of 1 to 4 linked nucleosides. In certain embodiments, the 3′-wing of a gapmer consists of 1 to 3 linked nucleosides. In certain embodiments, the 3′-wing of a gapmer consists of 1 or 2 linked nucleosides. In certain embodiments, the 3′-wing of a gapmer consists of 2 to 4 linked nucleosides. In certain embodiments, the 3′-wing of a gapmer consists of 2 or 3 linked nucleosides. In certain embodiments, the 3′-wing of a gapmer consists of 3 or 4 linked nucleosides. In certain embodiments, the 3′-wing of a gapmer consists of 1 nucleoside. In certain embodiments, the 3′-wing of a gapmer consists of 2 linked nucleosides. In certain embodiments, the 3′-wing of a gapmer consists of 3 linked nucleosides. In certain embodiments, the 3′-wing of a gapmer consists of 4 linked nucleosides. In certain embodiments, the 3′-wing of a gapmer consists of 5 linked nucleosides. In certain embodiments, the 3′-wing of a gapmer consists of 6 linked nucleosides.

[0513] In certain embodiments, the 3′-wing of a gapmer comprises at least one bicyclic nucleoside. In certain embodiments, the 3′-wing of a gapmer comprises at least one constrained ethyl nucleoside. In certain embodiments, the 3′-wing of a gapmer comprises at least one LNA nucleoside. In certain embodiments, each nucleoside of the 3′-wing of a gapmer is a bicyclic nucleoside. In certain embodiments, each nucleoside of the 3′-wing of a gapmer is a constrained ethyl nucleoside. In certain embodiments, each nucleoside of the 3′-wing of a gapmer is a LNA nucleoside.

[0514] In certain embodiments, the 3′-wing of a gapmer comprises at least one non-bicyclic modified nucleoside. In certain embodiments, the 3′-wing of a gapmer comprises at least two non-bicyclic modified nucleosides. In certain embodiments, the 3′-wing of a gapmer comprises at least three non-bicyclic modified nucleosides. In certain embodiments, the 3′-wing of a gapmer comprises at least four non-bicyclic modified nucleosides. In certain embodiments, the 3′-wing of a gapmer comprises at least one 2′-substituted nucleoside. In certain embodiments, the 3′-wing of a gapmer comprises at least one 2′-MOE nucleoside. In certain embodiments, the 3′-wing of a gapmer comprises at least one 2′-OMe nucleoside. In certain embodiments, each nucleoside of the 3′-wing of a gapmer is a non-bicyclic modified nucleoside. In certain embodiments, each nucleoside of the 3′-wing of a gapmer is a 2′-substituted nucleoside. In certain embodiments, each nucleoside of the 3′-wing of a gapmer is a 2′-MOE nucleoside. In certain embodiments, each nucleoside of the 3′-wing of a gapmer is a 2′-OMe nucleoside.

[0515] In certain embodiments, the 3′-wing of a gapmer comprises at least one 2′-deoxynucleoside. In certain embodiments, each nucleoside of the 3′-wing of a gapmer is a 2′-deoxynucleoside. In a certain embodiments, the 3′-wing of a gapmer comprises at least one ribonucleoside. In certain embodiments, each nucleoside of the 3′-wing of a gapmer is a ribonucleoside. In certain embodiments, one, more than one, or each of the nucleosides of the 5′-wing is an RNA-like nucleoside.

[0516] In certain embodiments, the 3′-wing of a gapmer comprises at least one bicyclic nucleoside and at least one non-bicyclic modified nucleoside. In certain embodiments, the 3′-wing of a gapmer comprises at least one bicyclic nucleoside and at least one 2′-substituted nucleoside. In certain embodiments, the 3′-wing of a gapmer comprises at least one bicyclic nucleoside and at least one 2′-MOE nucleoside. In certain embodiments, the 3′-wing of a gapmer comprises at least one bicyclic nucleoside and at least one 2′-OMe nucleoside. In certain embodiments, the 3′-wing of a gapmer comprises at least one bicyclic nucleoside and at least one 2′-deoxynucleoside.

[0517] In certain embodiments, the 3′-wing of a gapmer comprises at least one constrained ethyl nucleoside and at least one non-bicyclic modified nucleoside. In certain embodiments, the 3′-wing of a gapmer comprises at least one constrained ethyl nucleoside and at least one 2′-substituted nucleoside. In certain embodiments, the 3′-wing of a gapmer comprises at least one constrained ethyl nucleoside and at least one 2′-MOE nucleoside. In certain embodiments, the 3′-wing of a gapmer comprises at least one constrained ethyl nucleoside and at least one 2′-OMe nucleoside. In certain embodiments, the 3′-wing of a gapmer comprises at least one constrained ethyl nucleoside and at least one 2′-deoxynucleoside.

[0518] In certain embodiments, the 3′-wing of a gapmer comprises at least one LNA nucleoside and at least one non-bicyclic modified nucleoside. In certain embodiments, the 3′-wing of a gapmer comprises at least one LNA nucleoside and at least one 2′-substituted nucleoside. In certain embodiments, the 3′-wing of a gapmer comprises at least one LNA nucleoside and at least one 2′-MOE nucleoside. In certain embodiments, the 3′-wing of a gapmer comprises at least one LNA nucleoside and at least one 2′-OMe nucleoside. In certain embodiments, the 3′-wing of a gapmer comprises at least one LNA nucleoside and at least one 2′-deoxynucleoside.

[0519] In certain embodiments, the 3′-wing of a gapmer comprises at least one bicyclic nucleoside, at least one non-bicyclic modified nucleoside, and at least one 2′-deoxynucleoside. In certain embodiments, the 3′-wing of a gapmer comprises at least one constrained ethyl nucleoside, at least one non-bicyclic modified nucleoside, and at least one 2′-deoxynucleoside. In certain embodiments, the 3′-wing of a gapmer comprises at least one LNA nucleoside, at least one non-bicyclic modified nucleoside, and at least one 2′-deoxynucleoside.

[0520] In certain embodiments, the 3′-wing of a gapmer comprises at least one bicyclic nucleoside, at least one 2′-substituted nucleoside, and at least one 2′-deoxynucleoside. In certain embodiments, the 3′-wing of a gapmer comprises at least one constrained ethyl nucleoside, at least one 2′-substituted nucleoside, and at least one 2′-deoxynucleoside. In certain embodiments, the 3′-wing of a gapmer comprises at least one LNA nucleoside, at least one 2′-substituted nucleoside, and at least one 2′-deoxynucleoside.

[0521] In certain embodiments, the 3′-wing of a gapmer comprises at least one bicyclic nucleoside, at least one 2′-MOE nucleoside, and at least one 2′-deoxynucleoside. In certain embodiments, the 3′-wing of a gapmer comprises at least one constrained ethyl nucleoside, at least one 2′-MOE nucleoside, and at least one 2′-deoxynucleoside. In certain embodiments, the 3′-wing of a gapmer comprises at least one LNA nucleoside, at least one 2′-MOE nucleoside, and at least one 2′-deoxynucleoside.

[0522] In certain embodiments, the 3′-wing of a gapmer comprises at least one bicyclic nucleoside, at least one 2′-OMe nucleoside, and at least one 2′-deoxynucleoside. In certain embodiments, the 3′-wing of a gapmer comprises at least one constrained ethyl nucleoside, at least one 2′-OMe nucleoside, and at least one 2′-deoxynucleoside. In certain embodiments, the 3′-wing of a gapmer comprises at least one LNA nucleoside, at least one 2′-OMe nucleoside, and at least one 2′-deoxynucleoside.

### Certain Central Regions (Gaps)

[0523] In certain embodiments, the gap of a gapmer consists of 6 to 20 linked nucleosides. In certain embodiments, the gap of a gapmer consists of 6 to 15 linked nucleosides. In certain embodiments, the gap of a gapmer consists of 6 to 12 linked nucleosides. In certain embodiments, the gap of a gapmer consists of 6 to 10 linked nucleosides. In certain embodiments, the gap of a gapmer consists of 6 to 9 linked nucleosides. In certain embodiments, the gap of a gapmer consists of 6 to 8 linked nucleosides. In certain embodiments, the gap of a gapmer consists of 6 or 7 linked nucleosides. In certain embodiments, the gap of a gapmer consists of 7 to 10 linked nucleosides. In certain embodiments, the gap of a gapmer consists of 7 to 9 linked nucleosides. In certain embodiments, the gap of a gapmer consists of 7 or 8 linked nucleosides. In certain embodiments, the gap of a gapmer consists of 8 to 10 linked nucleosides. In certain embodiments, the gap of a gapmer consists of 8 or 9 linked nucleosides. In certain embodiments, the gap of a gapmer consists of 6 linked nucleosides. In certain embodiments, the gap of a gapmer consists of 7 linked nucleosides. In certain embodiments, the gap of a gapmer consists of 8 linked nucleosides. In certain embodiments, the gap of a gapmer consists of 9 linked nucleosides. In certain embodiments, the gap of a gapmer consists of 10 linked nucleosides. In certain embodiments, the gap of a gapmer consists of 11 linked nucleosides. In certain embodiments, the gap of a gapmer consists of 12 linked nucleosides.

[0524] In certain embodiments, each nucleoside of the gap of a gapmer is a 2′-deoxynucleoside. In certain embodiments, the gap comprises one or more modified nucleosides. In certain embodiments, each nucleoside of the gap of a gapmer is a 2′-deoxynucleoside or is a modified nucleoside that is “DNA-like.” In such embodiments, “DNA-like” means that the nucleoside has similar characteristics to DNA, such that a duplex comprising the gapmer and an RNA molecule is capable of activating RNase H. For example, under certain conditions, 2′-(ara)-F have been shown to support RNase H activation, and thus is DNA-like. In certain embodiments, one or more nucleosides of the gap of a gapmer is not a 2′-deoxynucleoside and is not DNA-like. In certain such embodiments, the gapmer nonetheless supports RNase H activation (e.g., by virtue of the number or placement of the non-DNA nucleosides).

[0525] In certain embodiments, gaps comprise a stretch of unmodified 2′-deoxynucleoside interrupted by one or more modified nucleosides, thus resulting in three sub-regions (two stretches of one or more 2′-deoxynucleosides and a stretch of one or more interrupting modified nucleosides). In certain embodiments, no stretch of unmodified 2′-deoxynucleosides is longer than 5, 6, or 7 nucleosides. In certain embodiments, such short stretches is achieved by using short gap regions. In certain embodiments, short stretches are achieved by interrupting a longer gap region.

[0526] In certain embodiments, the gap comprises one or more modified nucleosides. In certain embodiments, the gap comprises one or more modified nucleosides selected from among cEt, FHNA, LNA, and 2-thio-thymidine. In certain embodiments, the gap comprises one modified nucleoside. In certain embodiments, the gap comprises a 5′-substituted sugar moiety selected from among 5′-Me, and 5′-(R)-Me. In certain embodiments, the gap comprises two modified nucleosides. In certain embodiments, the gap comprises three modified nucleosides. In certain embodiments, the gap comprises four modified nucleosides. In certain embodiments, the gap comprises two or more modified nucleosides and each modified nucleoside is the same. In certain embodiments, the gap comprises two or more modified nucleosides and each modified nucleoside is different.

[0527] In certain embodiments, the gap comprises one or more modified linkages. In certain embodiments, the gap comprises one or more methyl phosphonate linkages. In certain embodiments the gap comprises two or more modified linkages. In certain embodiments, the gap comprises one or more modified linkages and one or more modified nucleosides. In certain embodiments, the gap comprises one modified linkage and one modified nucleoside. In certain embodiments, the gap comprises two modified linkages and two or more modified nucleosides.

### Certain Internucleoside Linkage Motifs

[0528] In certain embodiments, oligonucleotides comprise modified internucleoside linkages arranged along the oligonucleotide or region thereof in a defined pattern or modified internucleoside linkage motif. In certain embodiments, oligonucleotides comprise a region having an alternating internucleoside linkage motif. In certain embodiments, oligonucleotides of the present disclosure comprise a region of uniformly modified internucleoside linkages. In certain such embodiments, the oligonucleotide comprises a region that is uniformly linked by phosphorothioate internucleoside linkages. In certain embodiments, the oligonucleotide is uniformly linked by phosphorothioate internucleoside linkages. In certain embodiments, each internucleoside linkage of the oligonucleotide is selected from phosphodiester and phosphorothioate. In certain embodiments, each internucleoside linkage of the oligonucleotide is selected from phosphodiester and phosphorothioate and at least one internucleoside linkage is phosphorothioate.

[0529] In certain embodiments, the oligonucleotide comprises at least 6 phosphorothioate internucleoside linkages. In certain embodiments, the oligonucleotide comprises at least 7 phosphorothioate internucleoside linkages. In certain embodiments, the oligonucleotide comprises at least 8 phosphorothioate internucleoside linkages. In certain embodiments, the oligonucleotide comprises at least 9 phosphorothioate internucleoside linkages. In certain embodiments, the oligonucleotide comprises at least 10 phosphorothioate internucleoside linkages. In certain embodiments, the oligonucleotide comprises at least 11 phosphorothioate internucleoside linkages. In certain embodiments, the oligonucleotide comprises at least 12 phosphorothioate internucleoside linkages. In certain embodiments, the oligonucleotide comprises at least 13 phosphorothioate internucleoside linkages. In certain embodiments, the oligonucleotide comprises at least 14 phosphorothioate internucleoside linkages.

[0530] In certain embodiments, the oligonucleotide comprises at least one block of at least 6 consecutive phosphorothioate internucleoside linkages. In certain embodiments, the oligonucleotide comprises at least one block of at least 7 consecutive phosphorothioate internucleoside linkages. In certain embodiments, the oligonucleotide comprises at least one block of at least 8 consecutive phosphorothioate internucleoside linkages. In certain embodiments, the oligonucleotide comprises at least one block of at least 9 consecutive phosphorothioate internucleoside linkages. In certain embodiments, the oligonucleotide comprises at least one block of at least 10 consecutive phosphorothioate internucleoside linkages. In certain embodiments, the oligonucleotide comprises at least block of at least one 12 consecutive phosphorothioate internucleoside linkages. In certain such embodiments, at least one such block is located at the 3′ end of the oligonucleotide. In certain such embodiments, at least one such block is located within 3 nucleosides of the 3′ end of the oligonucleotide. In certain embodiments, the oligonucleotide comprises less than 15 phosphorothioate internucleoside linkages. In certain embodiments, the oligonucleotide comprises less than 14 phosphoro-thioate internucleoside linkages. In certain embodiments, the oligonucleotide comprises less than 13 phosphorothioate internucleoside linkages. In certain embodiments, the oligonucleotide comprises less than 12 phosphorothioate internucleoside linkages. In certain embodiments, the oligonucleotide comprises less than 11 phosphorothioate internucleoside linkages. In certain embodiments, the oligonucleotide comprises less than 10 phosphorothioate internucleoside linkages. In certain embodiments, the oligonucleotide comprises less than 9 phosphorothioate internucleoside linkages. In certain embodiments, the oligonucleotide comprises less than 8 phosphorothioate internucleoside linkages. In certain embodiments, the oligonucleotide comprises less than 7 phosphorothioate internucleoside linkages. In certain embodiments, the oligonucleotide comprises less than 6 phosphorothioate internucleoside linkages. In certain embodiments, the oligonucleotide comprises less than 5 phosphorothioate internucleoside linkages.

### Certain Nucleobase Modification Motifs

[0531] In certain embodiments, oligonucleotides comprise chemical modifications to nucleobases arranged along the oligonucleotide or region thereof in a defined pattern or nucleobases modification motif. In certain such embodiments, nucleobase modifications are arranged in a gapped motif. In certain embodiments, nucleobase modifications are arranged in an alternating motif. In certain embodiments, each nucleobase is modified. In certain embodiments, none of the nucleobases is chemically modified.

[0532] In certain embodiments, oligonucleotides comprise a block of modified nucleobases. In certain such embodiments, the block is at the 3′-end of the oligonucleotide. In certain embodiments the block is within 3 nucleotides of the 3′-end of the oligonucleotide. In certain such embodiments, the block is at the 5′-end of the oligonucleotide. In certain embodiments the block is within 3 nucleotides of the 5′-end of the oligonucleotide.

[0533] In certain embodiments, nucleobase modifications are a function of the natural base at a particular position of an oligonucleotide. For example, in certain embodiments each purine or each pyrimidine in an oligonucleotide is modified. In certain embodiments, each adenine is modified. In certain embodiments, each guanine is modified. In certain embodiments, each thymine is modified. In certain embodiments, each cytosine is modified. In certain embodiments, each uracil is modified.

[0534] In certain embodiments, some, all, or none of the cytosine moieties in an oligonucleotide are 5-methyl cytosine moieties. Herein, 5-methyl cytosine is not a “modified nucleobase.” Accordingly, unless otherwise indicated, unmodified nucleobases include both cytosine residues having a 5-methyl and those lacking a 5 methyl. In certain embodiments, the methylation state of all or some cytosine nucleobases is specified.

[0535] In certain embodiments, chemical modifications to nucleobases comprise attachment of certain conjugate groups to nucleobases. In certain embodiments, each purine or each pyrimidine in an oligonucleotide may be optionally modified to comprise a conjugate group.

### Certain Overall Lengths

[0536] In certain embodiments, the present disclosure provides oligonucleotides of any of a variety of ranges of lengths. In certain embodiments, oligonucleotides consist of X to Y linked nucleosides, where X represents the fewest number of nucleosides in the range and Y represents the largest number of nucleosides in the range. In certain such embodiments, X and Y are each independently selected from 8, 9, 10, 11, 12, 13, 14, 15, 16, 17, 18, 19, 20, 21, 22, 23, 24, 25, 26, 27, 28, 29, 30, 31, 32, 33, 34, 35, 36, 37, 38, 39, 40, 41, 42, 43, 44, 45, 46, 47, 48, 49, and 50; provided that X≦Y. For example, in certain embodiments, the oligonucleotide may consist of 8 to 9, 8 to 10, 8 to 11, 8 to 12, 8 to 13, 8 to 14, 8 to 15, 8 to 16, 8 to 17, 8 to 18, 8 to 19, 8 to 20, 8 to 21, 8 to 22, 8 to 23, 8 to 24, 8 to 25, 8 to 26, 8 to 27, 8 to 28, 8 to 29, 8 to 30, 9 to 10, 9 to 11, 9 to 12, 9 to 13, 9 to 14, 9 to 15, 9 to 16, 9 to 17, 9 to 18, 9 to 19, 9 to 20, 9 to 21, 9 to 22, 9 to 23, 9 to 24, 9 to 25, 9 to 26, 9 to 27, 9 to 28, 9 to 29, 9 to 30, 10 to 11, 10 to 12, 10 to 13, 10 to 14, 10 to 15, 10 to 16, 10 to 17, 10 to 18, 10 to 19, 10 to 20, 10 to 21, 10 to 22, 10 to 23, 10 to 24, 10 to 25, 10 to 26, 10 to 27, 10 to 28, 10 to 29, 10 to 30, 11 to 12, 11 to 13, 11 to 14, 11 to 15, 11 to 16, 11 to 17, 11 to 18, 11 to 19, 11 to 20, 11 to 21, 11 to 22, 11 to 23, 11 to 24, 11 to 25, 11 to 26, 11 to 27, 11 to 28, 11 to 29, 11 to 30, 12 to 13, 12 to 14, 12 to 15, 12 to 16, 12 to 17, 12 to 18, 12 to 19, 12 to 20, 12 to 21, 12 to 22, 12 to 23, 12 to 24, 12 to 25, 12 to 26, 12 to 27, 12 to 28, 12 to 29, 12 to 30, 13 to 14, 13 to 15, 13 to 16, 13 to 17, 13 to 18, 13 to 19, 13 to 20, 13 to 21, 13 to 22, 13 to 23, 13 to 24, 13 to 25, 13 to 26, 13 to 27, 13 to 28, 13 to 29, 13 to 30, 14 to 15, 14 to 16, 14 to 17, 14 to 18, 14 to 19, 14 to 20, 14 to 21, 14 to 22, 14 to 23, 14 to 24, 14 to 25, 14 to 26, 14 to 27, 14 to 28, 14 to 29, 14 to 30, 15 to 16, 15 to 17, 15 to 18, 15 to 19, 15 to 20, 15 to 21, 15 to 22, 15 to 23, 15 to 24, 15 to 25, 15 to 26, 15 to 27, 15 to 28, 15 to 29, 15 to 30, 16 to 17, 16 to 18, 16 to 19, 16 to 20, 16 to 21, 16 to 22, 16 to 23, 16 to 24, 16 to 25, 16 to 26, 16 to 27, 16 to 28, 16 to 29, 16 to 30, 17 to 18, 17 to 19, 17 to 20, 17 to 21, 17 to 22, 17 to 23, 17 to 24, 17 to 25, 17 to 26, 17 to 27, 17 to 28, 17 to 29, 17 to 30, 18 to 19, 18 to 20, 18 to 21, 18 to 22, 18 to 23, 18 to 24, 18 to 25, 18 to 26, 18 to 27, 18 to 28, 18 to 29, 18 to 30, 19 to 20, 19 to 21, 19 to 22, 19 to 23, 19 to 24, 19 to 25, 19 to 26, 19 to 29, 19 to 28, 19 to 29, 19 to 30, 20 to 21, 20 to 22, 20 to 23, 20 to 24, 20 to 25, 20 to 26, 20 to 27, 20 to 28, 20 to 29, 20 to 30, 21 to 22, 21 to 23, 21 to 24, 21 to 25, 21 to 26, 21 to 27, 21 to 28, 21 to 29, 21 to 30, 22 to 23, 22 to 24, 22 to 25, 22 to 26, 22 to 27, 22 to 28, 22 to 29, 22 to 30, 23 to 24, 23 to 25, 23 to 26, 23 to 27, 23 to 28, 23 to 29, 23 to 30, 24 to 25, 24 to 26, 24 to 27, 24 to 28, 24 to 29, 24 to 30, 25 to 26, 25 to 27, 25 to 28, 25 to 29, 25 to 30, 26 to 27, 26 to 28, 26 to 29, 26 to 30, 27 to 28, 27 to 29, 27 to 30, 28 to 29, 28 to 30, or 29 to 30 linked nucleosides. In embodiments where the number of nucleosides of an oligonucleotide of a compound is limited, whether to a range or to a specific number, the compound may, nonetheless further comprise additional other substituents. For example, an oligonucleotide comprising 8-30 nucleosides excludes oligonucleotides having 31 nucleosides, but, unless otherwise indicated, such an oligonucleotide may further comprise, for example one or more conjugate groups, terminal groups, or other substituents.

[0537] Further, where an oligonucleotide is described by an overall length range and by regions having specified lengths, and where the sum of specified lengths of the regions is less than the upper limit of the overall length range, the oligonucleotide may have additional nucleosides, beyond those of the specified regions, provided that the total number of nucleosides does not exceed the upper limit of the overall length range.

### Certain Antisense Oligonucleotide Chemistry Motifs

[0538] In certain embodiments, the chemical structural features of antisense oligonucleotides are characterized by their sugar motif, internucleoside linkage motif, nucleobase modification motif and overall length. In certain embodiments, such parameters are each independent of one another. Thus, each internucleoside linkage of an oligonucleotide having a gapmer sugar motif may be modified or unmodified and may or may not follow the gapmer modification pattern of the sugar modifications. Thus, the internucleoside linkages within the wing regions of a sugar-gapmer may be the same or different from one another and may be the same or different from the internucleoside linkages of the gap region. Likewise, such sugar-gapmer oligonucleotides may comprise one or more modified nucleobase independent of the gapmer pattern of the sugar modifications. One of skill in the art will appreciate that such motifs may be combined to create a variety of oligonucleotides.

[0539] In certain embodiments, the selection of internucleoside linkage and nucleoside modification are not independent of one another.

[0540] a. Certain Sequences and Targets

[0541] In certain embodiments, the invention provides antisense oligonucleotides having a sequence complementary to a target nucleic acid. Such antisense compounds are capable of hybridizing to a target nucleic acid, resulting in at least one antisense activity. In certain embodiments, antisense compounds specifically hybridize to one or more target nucleic acid. In certain embodiments, a specifically hybridizing antisense compound has a nucleobase sequence comprising a region having sufficient complementarity to a target nucleic acid to allow hybridization and result in antisense activity and insufficient complementarity to any non-target so as to avoid or reduce non-specific hybridization to non-target nucleic acid sequences under conditions in which specific hybridization is desired (e.g., under physiological conditions for in vivo or therapeutic uses, and under conditions in which assays are performed in the case of in vitro assays). In certain embodiments, oligonucleotides are selective between a target and non-target, even though both target and non-target comprise the target sequence. In such embodiments, selectivity may result from relative accessibility of the target region of one nucleic acid molecule compared to the other.

[0542] In certain embodiments, the present disclosure provides antisense compounds comprising oligonucleotides that are fully complementary to the target nucleic acid over the entire length of the oligonucleotide. In certain embodiments, oligonucleotides are 99% complementary to the target nucleic acid. In certain embodiments, oligonucleotides are 95% complementary to the target nucleic acid. In certain embodiments, such oligonucleotides are 90% complementary to the target nucleic acid.

[0543] In certain embodiments, such oligonucleotides are 85% complementary to the target nucleic acid. In certain embodiments, such oligonucleotides are 80% complementary to the target nucleic acid. In certain embodiments, an antisense compound comprises a region that is fully complementary to a target nucleic acid and is at least 80% complementary to the target nucleic acid over the entire length of the oligonucleotide. In certain such embodiments, the region of full complementarity is from 6 to 14 nucleobases in length.

[0544] In certain embodiments, oligonucleotides comprise a hybridizing region and a terminal region. In certain such embodiments, the hybridizing region consists of 12-30 linked nucleosides and is fully complementary to the target nucleic acid. In certain embodiments, the hybridizing region includes one mismatch relative to the target nucleic acid. In certain embodiments, the hybridizing region includes two mismatches relative to the target nucleic acid. In certain embodiments, the hybridizing region includes three mismatches relative to the target nucleic acid. In certain embodiments, the terminal region consists of 1-4 terminal nucleosides. In certain embodiments, the terminal nucleosides are at the 3′ end. In certain embodiments, one or more of the terminal nucleosides are not complementary to the target nucleic acid.

[0545] Antisense mechanisms include any mechanism involving the hybridization of an oligonucleotide with target nucleic acid, wherein the hybridization results in a biological effect. In certain embodiments, such hybridization results in either target nucleic acid degradation or occupancy with concomitant inhibition or stimulation of the cellular machinery involving, for example, translation, transcription, or splicing of the target nucleic acid.

[0546] One type of antisense mechanism involving degradation of target RNA is RNase H mediated antisense. RNase H is a cellular endonuclease which cleaves the RNA strand of an RNA:DNA duplex. It is known in the art that single-stranded antisense compounds which are “DNA-like” elicit RNase H activity in mammalian cells. Activation of RNase H, therefore, results in cleavage of the RNA target, thereby greatly enhancing the efficiency of DNA-like oligonucleotide-mediated inhibition of gene expression.

[0547] In certain embodiments, a conjugate group comprises a cleavable moiety. In certain embodiments, a conjugate group comprises one or more cleavable bond. In certain embodiments, a conjugate group comprises a linker. In certain embodiments, a linker comprises a protein binding moiety. In certain embodiments, a conjugate group comprises a cell-targeting moiety (also referred to as a cell-targeting group). In certain embodiments a cell-targeting moiety comprises a branching group. In certain embodiments, a cell-targeting moiety comprises one or more tethers. In certain embodiments, a cell-targeting moiety comprises a carbohydrate or carbohydrate cluster.

[0548] b. Certain Connecting Groups

[0549] In certain embodiments, one or more conjugates are attached to an oligomeric compound through a connecting group. In certain embodiments, a connecting group includes a tether or a portion of a tether. In certain embodiments, a connecting group includes a branching group or a portion of a branching group. In certain embodiments, a connecting group includes a linking group or a portion of a linking group. In certain embodiments, a connecting group includes a cleavable moiety or a portion of a cleavable moiety. In certain embodiments, a connecting group includes a tether, a branching group, and/or a linking group or a portion of a tether, a branching group, and/or a linking group.

[0550] In certain embodiments, a connecting group includes a tether and a branching group. In certain embodiments, a connecting group includes a portion of a tether and branching group. In certain embodiments, a connecting group includes a tether and portion of a branching group. In certain embodiments, a connecting group includes or a portion of a tether and portion of a branching group.

[0551] In certain embodiments, a connecting group includes a tether and a linking group. In certain embodiments, a connecting group includes a portion of a tether and linking group. In certain embodiments, a connecting group includes a tether and portion of a linking group. In certain embodiments, a connecting group includes a portion of a tether and portion of a linking group.

[0552] In certain embodiments, a connecting group includes a branching group and a linking group. In certain embodiments, a connecting group includes a portion of a branching group and linking group. In certain embodiments, a connecting group includes a branching group and portion of a linking group. In certain embodiments, a connecting group includes a portion of a branching group and portion of a linking group.

[0553] i. Certain Tethers

[0554] In certain embodiments, conjugate groups comprise one or more tethers covalently attached to the branching group. In certain embodiments, conjugate groups comprise one or more tethers covalently attached to the linking group. In certain embodiments, each tether is a linear aliphatic group comprising one or more groups selected from alkyl, ether, thioether, disulfide, amide and polyethylene glycol groups in any combination. In certain embodiments, each tether is a linear aliphatic group comprising one or more groups selected from alkyl, substituted alkyl, ether, thioether, disulfide, amide, phosphodiester and polyethylene glycol groups in any combination. In certain embodiments, each tether is a linear aliphatic group comprising one or more groups selected from alkyl, ether and amide groups in any combination. In certain embodiments, each tether is a linear aliphatic group comprising one or more groups selected from alkyl, substituted alkyl, phosphodiester, ether and amide groups in any combination. In certain embodiments, each tether is a linear aliphatic group comprising one or more groups selected from alkyl and phosphodiester in any combination. In certain embodiments, each tether comprises at least one phosphorus linking group or neutral linking group.

[0555] In certain embodiments, the tether includes one or more cleavable bond. In certain embodiments, the tether is attached to the branching group through either an amide or an ether group. In certain embodiments, the tether is attached to the branching group through a phosphodiester group. In certain embodiments, the tether is attached to the branching group through a phosphorus linking group or neutral linking group. In certain embodiments, the tether is attached to the branching group through an ether group. In certain embodiments, the tether is attached to the ligand through either an amide or an ether group. In certain embodiments, the tether is attached to the ligand through an ether group. In certain embodiments, the tether is attached to the ligand through either an amide or an ether group. In certain embodiments, the tether is attached to the ligand through an ether group.

[0556] In certain embodiments, each tether comprises from about 8 to about 20 atoms in chain length between the ligand and the branching group. In certain embodiments, each tether group comprises from about 10 to about 18 atoms in chain length between the ligand and the branching group. In certain embodiments, each tether group comprises about 13 atoms in chain length.

[0557] In certain embodiments, a tether has a structure selected from among:

[chemical structure]

wherein each n is, independently, from 1 to 20; and
each p is from 1 to about 6.

[0558] In certain embodiments, a tether has a structure selected from among:

[chemical structure]

[0559] In certain embodiments, a tether has a structure selected from among:

[chemical structure]

[0560] wherein each n is, independently, from 1 to 20.

[0561] In certain embodiments, a tether has a structure selected from among:

[chemical structure]

[0562] wherein L is either a phosphorus linking group or a neutral linking group;

[0563] Z₁ is C(═O)O—R₂;

[0564] Z₂ is H, C₁-C₆ alkyl or substituted C₁-C₆ alky;

[0565] R₂ is H, C₁-C₆ alkyl or substituted C₁-C₆ alky; and

each m₁ is, independently, from 0 to 20 wherein at least one m₁ is greater than 0 for each tether.

[0566] In certain embodiments, a tether has a structure selected from among:

[chemical structure]

[0567] In certain embodiments, a tether has a structure selected from among:

[chemical structure]

[0568] wherein Z₂ is H or CH₃; and

each m₁ is, independently, from 0 to 20 wherein at least one m₁ is greater than 0 for each tether.

[0569] In certain embodiments, a tether has a structure selected from among:

[chemical structure]

wherein each n is independently, 0, 1, 2, 3, 4, 5, 6, or 7.

[0570] In certain embodiments, a tether comprises a phosphorus linking group. In certain embodiments, a tether does not comprise any amide bonds. In certain embodiments, a tether comprises a phosphorus linking group and does not comprise any amide bonds.

[0571] ii. Certain Linking Groups

[0572] In certain embodiments, the conjugate groups comprise a linking group. In certain such embodiments, the linking group is covalently bound to the cleavable moiety. In certain such embodiments, the linking group is covalently bound to the antisense oligonucleotide. In certain embodiments, the linking group is covalently bound to a cell-targeting moiety. In certain embodiments, the linking group further comprises a covalent attachment to a solid support. In certain embodiments, the linking group further comprises a covalent attachment to a protein binding moiety. In certain embodiments, the linking group further comprises a covalent attachment to a solid support and further comprises a covalent attachment to a protein binding moiety. In certain embodiments, the linking group includes multiple positions for attachment of tethered ligands. In certain embodiments, the linking group includes multiple positions for attachment of tethered ligands and is not attached to a branching group. In certain embodiments, the linking group further comprises one or more cleavable bond. In certain embodiments, the conjugate group does not include a linking group.

[0573] In certain embodiments, the linking group includes at least a linear group comprising groups selected from alkyl, amide, disulfide, polyethylene glycol, ether, thioether (—S—) and hydroxylamino (—O—N(H)—) groups. In certain embodiments, the linear group comprises groups selected from alkyl, amide and ether groups. In certain embodiments, the linear group comprises groups selected from alkyl and ether groups. In certain embodiments, the linear group comprises at least one phosphorus linking group. In certain embodiments, the linear group comprises at least one phosphodiester group. In certain embodiments, the linear group includes at least one neutral linking group. In certain embodiments, the linear group is covalently attached to the cell-targeting moiety and the cleavable moiety. In certain embodiments, the linear group is covalently attached to the cell-targeting moiety and the antisense oligonucleotide. In certain embodiments, the linear group is covalently attached to the cell-targeting moiety, the cleavable moiety and a solid support. In certain embodiments, the linear group is covalently attached to the cell-targeting moiety, the cleavable moiety, a solid support and a protein binding moiety. In certain embodiments, the linear group includes one or more cleavable bond.

[0574] In certain embodiments, the linking group includes the linear group covalently attached to a scaffold group. In certain embodiments, the scaffold includes a branched aliphatic group comprising groups selected from alkyl, amide, disulfide, polyethylene glycol, ether, thioether and hydroxylamino groups. In certain embodiments, the scaffold includes a branched aliphatic group comprising groups selected from alkyl, amide and ether groups. In certain embodiments, the scaffold includes at least one mono or polycyclic ring system. In certain embodiments, the scaffold includes at least two mono or polycyclic ring systems. In certain embodiments, the linear group is covalently attached to the scaffold group and the scaffold group is covalently attached to the cleavable moiety and the linking group. In certain embodiments, the linear group is covalently attached to the scaffold group and the scaffold group is covalently attached to the cleavable moiety, the linking group and a solid support. In certain embodiments, the linear group is covalently attached to the scaffold group and the scaffold group is covalently attached to the cleavable moiety, the linking group and a protein binding moiety. In certain embodiments, the linear group is covalently attached to the scaffold group and the scaffold group is covalently attached to the cleavable moiety, the linking group, a protein binding moiety and a solid support. In certain embodiments, the scaffold group includes one or more cleavable bond.

[0575] In certain embodiments, the linking group includes a protein binding moiety. In certain embodiments, the protein binding moiety is a lipid such as for example including but not limited to cholesterol, cholic acid, adamantane acetic acid, 1-pyrene butyric acid, dihydrotestosterone, 1,3-Bis-O(hexadecyl)glycerol, geranyloxyhexyl group, hexadecylglycerol, borneol, menthol, 1,3-propanediol, heptadecyl group, palmitic acid, myristic acid, O3-(oleoyl)lithocholic acid, O3-(oleoyl)cholenic acid, dimethoxytrityl, or phenoxazine), a vitamin (e.g., folate, vitamin A, vitamin E, biotin, pyridoxal), a peptide, a carbohydrate (e.g., monosaccharide, disaccharide, trisaccharide, tetrasaccharide, oligosaccharide, polysaccharide), an endosomolytic component, a steroid (e.g., uvaol, hecigenin, diosgenin), a terpene (e.g., triterpene, e.g., sarsasapogenin, friedelin, epifriedelanol derivatized lithocholic acid), or a cationic lipid. In certain embodiments, the protein binding moiety is a C16 to C22 long chain saturated or unsaturated fatty acid, cholesterol, cholic acid, vitamin E, adamantane or 1-pentafluoropropyl.

[0576] In certain embodiments, a linking group has a structure selected from among:

[chemical structure]

[chemical structure]

[chemical structure]

wherein each n is, independently, from 1 to 20; and p is from 1 to 6.

[0577] In certain embodiments, a linking group has a structure selected from among:

[chemical structure]

[chemical structure]

wherein each n is, independently, from 1 to 20.

[0578] In certain embodiments, a linking group has a structure selected from among:

[chemical structure]

[chemical structure]

wherein n is from 1 to 20.

[0579] In certain embodiments, a linking group has a structure selected from among:

[chemical structure]

[chemical structure]

[chemical structure]

wherein each L is, independently, a phosphorus linking group or a neutral linking group; and
each n is, independently, from 1 to 20.

[0580] In certain embodiments, a linking group has a structure selected from among:

[chemical structure]

[chemical structure]

[chemical structure]

[chemical structure]

[0581] In certain embodiments, a linking group has a structure selected from among:

[chemical structure]

[chemical structure]

[0582] In certain embodiments, a linking group has a structure selected from among:

[chemical structure]

[chemical structure]

[chemical structure]

[0583] In certain embodiments, a linking group has a structure selected from among:

[chemical structure]

wherein n is from 1 to 20.

[0584] In certain embodiments, a linking group has a structure selected from among:

[chemical structure]

[0585] In certain embodiments, a linking group has a structure selected from among:

[chemical structure]

[0586] In certain embodiments, a linking group has a structure selected from among:

[chemical structure]

[0587] In certain embodiments, the conjugate linking group has the structure:

[chemical structure]

[0588] In certain embodiments, the conjugate linking group has the structure:

[chemical structure]

[0589] In certain embodiments, a linking group has a structure selected from among:

[chemical structure]

[0590] In certain embodiments, a linking group has a structure selected from among:

[chemical structure]

wherein each n is independently, 0, 1, 2, 3, 4, 5, 6, or 7.

[0591] c. Certain Branching Groups

[0592] In certain embodiments, the conjugate groups comprise a targeting moiety comprising a branching group and at least two tethered ligands. In certain embodiments, the branching group attaches the conjugate linker. In certain embodiments, the branching group attaches the cleavable moiety. In certain embodiments, the branching group attaches the antisense oligonucleotide. In certain embodiments, the branching group is covalently attached to the linker and each of the tethered ligands. In certain embodiments, the branching group comprises a branched aliphatic group comprising groups selected from alkyl, amide, disulfide, polyethylene glycol, ether, thioether and hydroxylamino groups. In certain embodiments, the branching group comprises groups selected from alkyl, amide and ether groups. In certain embodiments, the branching group comprises groups selected from alkyl and ether groups. In certain embodiments, the branching group comprises a mono or polycyclic ring system. In certain embodiments, the branching group comprises one or more cleavable bond. In certain embodiments, the conjugate group does not include a branching group.

[0593] In certain embodiments, a branching group has a structure selected from among:

[chemical structure]

[chemical structure]

[chemical structure]

[0594] wherein each n is, independently, from 1 to 20;

j is from 1 to 3; and

[0595] m is from 2 to 6.

[0596] In certain embodiments, a branching group has a structure selected from among:

[chemical structure]

[chemical structure]

[0597] wherein each n is, independently, from 1 to 20; and

[0598] m is from 2 to 6.

[0599] In certain embodiments, a branching group has a structure selected from among:

[chemical structure]

[chemical structure]

[chemical structure]

[0600] In certain embodiments, a branching group has a structure selected from among:

[chemical structure]

[0601] wherein each A₁ is independently, O, S, C═O or NH; and

[0602] each n is, independently, from 1 to 20.

[0603] In certain embodiments, a branching group has a structure selected from among:

[chemical structure]

wherein each A₁ is independently, O, S, C═O or NH; and

[0604] each n is, independently, from 1 to 20.

[0605] In certain embodiments, a branching group has a structure selected from among:

[chemical structure]

wherein A₁ is O, S, C═O or NH; and
each n is, independently, from 1 to 20.

[0606] In certain embodiments, a branching group has a structure selected from among:

[chemical structure]

[0607] In certain embodiments, a branching group has a structure selected from among:

[chemical structure]

[0608] In certain embodiments, a branching group has a structure selected from among:

[chemical structure]

[0609] d. Certain Cleavable Moieties

[0610] In certain embodiments, a cleavable moiety is a cleavable bond. In certain embodiments, a cleavable moiety comprises a cleavable bond. In certain embodiments, the conjugate group comprises a cleavable moiety. In certain such embodiments, the cleavable moiety attaches to the antisense oligonucleotide. In certain such embodiments, the cleavable moiety attaches directly to the cell-targeting moiety. In certain such embodiments, the cleavable moiety attaches to the conjugate linker. In certain embodiments, the cleavable moiety comprises a phosphate or phosphodiester. In certain embodiments, the cleavable moiety is a cleavable nucleoside or nucleoside analog. In certain embodiments, the nucleoside or nucleoside analog comprises an optionally protected heterocyclic base selected from a purine, substituted purine, pyrimidine or substituted pyrimidine. In certain embodiments, the cleavable moiety is a nucleoside comprising an optionally protected heterocyclic base selected from uracil, thymine, cytosine, 4-N-benzoylcytosine, 5-methylcytosine, 4-N-benzoyl-5-methylcytosine, adenine, 6-N-benzoyladenine, guanine and 2-N-isobutyrylguanine. In certain embodiments, the cleavable moiety is 2′-deoxy nucleoside that is attached to the 3′ position of the antisense oligonucleotide by a phosphodiester linkage and is attached to the linker by a phosphodiester or phosphorothioate linkage. In certain embodiments, the cleavable moiety is 2′-deoxy adenosine that is attached to the 3′ position of the antisense oligonucleotide by a phosphodiester linkage and is attached to the linker by a phosphodiester or phosphorothioate linkage. In certain embodiments, the cleavable moiety is 2′-deoxy adenosine that is attached to the 3′ position of the antisense oligonucleotide by a phosphodiester linkage and is attached to the linker by a phosphodiester linkage.

[0611] In certain embodiments, the cleavable moiety is attached to the 3′ position of the antisense oligonucleotide. In certain embodiments, the cleavable moiety is attached to the 5′ position of the antisense oligonucleotide. In certain embodiments, the cleavable moiety is attached to a 2′ position of the antisense oligonucleotide. In certain embodiments, the cleavable moiety is attached to the antisense oligonucleotide by a phosphodiester linkage. In certain embodiments, the cleavable moiety is attached to the linker by either a phosphodiester or a phosphorothioate linkage. In certain embodiments, the cleavable moiety is attached to the linker by a phosphodiester linkage. In certain embodiments, the conjugate group does not include a cleavable moiety.

[0612] In certain embodiments, the cleavable moiety is cleaved after the complex has been administered to an animal only after being internalized by a targeted cell. Inside the cell the cleavable moiety is cleaved thereby releasing the active antisense oligonucleotide. While not wanting to be bound by theory it is believed that the cleavable moiety is cleaved by one or more nucleases within the cell. In certain embodiments, the one or more nucleases cleave the phosphodiester linkage between the cleavable moiety and the linker. In certain embodiments, the cleavable moiety has a structure selected from among the following:

[chemical structure]

wherein each of Bx, Bx₁, Bx₂, and Bx₃ is independently a heterocyclic base moiety. In certain embodiments, the cleavable moiety has a structure selected from among the following:

[chemical structure]

[0613] e. Certain Cell-Targeting Moieties

[0614] In certain embodiments, conjugate groups comprise cell-targeting moieties. Certain such cell-targeting moieties increase cellular uptake of antisense compounds. In certain embodiments, cell-targeting moieties comprise a branching group, one or more tether, and one or more ligand. In certain embodiments, cell-targeting moieties comprise a branching group, one or more tether, one or more ligand and one or more cleavable bond. In certain embodiments, cell-targeting moieties comprise a portion of a connecting group. In certain embodiments, cell-targeting moieties comprise a portion of a connecting group and one or more ligands. In certain embodiments, cell-targeting moieties comprise a portion of a connecting group and one ligand. In certain embodiments, cell-targeting moieties comprise a portion of a connecting group and two ligands. In certain embodiments, cell-targeting moieties comprise a portion of a connecting group three ligands.

[0615] f. Certain Ligands

[0616] In certain embodiments, the present disclosure provides ligands wherein each ligand is covalently attached to a tether. In certain embodiments, each ligand is selected to have an affinity for at least one type of receptor on a target cell. In certain embodiments, ligands are selected that have an affinity for at least one type of receptor on the surface of a mammalian liver cell. In certain embodiments, ligands are selected that have an affinity for the hepatic asialoglycoprotein receptor (ASGP-R). In certain embodiments, each ligand is a carbohydrate. In certain embodiments, each ligand is, independently selected from galactose, N-acetyl galactoseamine, mannose, glucose, glucosamone and fucose. In certain embodiments, each ligand is N-acetyl galactoseamine (GalNAc). In certain embodiments, the targeting moiety comprises 2 to 6 ligands. In certain embodiments, the targeting moiety comprises 3 ligands. In certain embodiments, the targeting moiety comprises 3 N-acetyl galactoseamine ligands.

[0617] In certain embodiments, the ligand is a carbohydrate, carbohydrate derivative, modified carbohydrate, multivalent carbohydrate cluster, polysaccharide, modified polysaccharide, or polysaccharide derivative. In certain embodiments, the ligand is an amino sugar or a thio sugar. For example, amino sugars may be selected from any number of compounds known in the art, for example glucosamine, sialic acid, α-D-galactosamine, N-Acetylgalactosamine, 2-acetamido-2-deoxy-D-galactopyranose (GalNAc), 2-Amino-3-O—[(R)-1-carboxyethyl]-2-deoxy-β-D-glucopyranose (β-muramic acid), 2-Deoxy-2-methylamino-L-glucopyranose, 4,6-Dideoxy-4-formamido-2,3-di-O-methyl-D-mannopyranose, 2-Deoxy-2-sulfoamino-D-glucopyranose and N-sulfo-D-glucosamine, and N-Glycoloyl-α-neuraminic acid. For example, thio sugars may be selected from the group consisting of 5-Thio-β-D-glucopyranose, Methyl 2,3,4-tri-O-acetyl-1-thio-6-O-trityl-α-D-glucopyranoside, 4-Thio-β-D-galactopyranose, and ethyl 3,4,6,7-tetra-O-acetyl-2-deoxy-1,5-dithio-α-D-gluco-heptopyranoside.

[0618] In certain embodiments, “GalNac” or “Gal-NAc” refers to 2-(Acetylamino)-2-deoxy-D-galactopyranose, commonly referred to in the literature as N-acetyl galactosamine. In certain embodiments, “N-acetyl galactosamine” refers to 2-(Acetylamino)-2-deoxy-D-galactopyranose. In certain embodiments, “GalNac” or “Gal-NAc” refers to 2-(Acetylamino)-2-deoxy-D-galactopyranose. In certain embodiments, “GalNac” or “Gal-NAc” refers to 2-(Acetylamino)-2-deoxy-D-galactopyranose, which includes both the 3-form: 2-(Acetylamino)-2-deoxy-β-D-galactopyranose and α-form: 2-(Acetylamino)-2-deoxy-D-galactopyranose. In certain embodiments, both the β-form: 2-(Acetylamino)-2-deoxy-β-D-galactopyranose and α-form: 2-(Acetylamino)-2-deoxy-D-galactopyranose may be used interchangeably. Accordingly, in structures in which one form is depicted, these structures are intended to include the other form as well. For example, where the structure for an α-form: 2-(Acetylamino)-2-deoxy-D-galactopyranose is shown, this structure is intended to include the other form as well. In certain embodiments, In certain preferred embodiments, the β-form 2-(Acetylamino)-2-deoxy-D-galactopyranose is the preferred embodiment.

[chemical structure]

[0619] In certain embodiments a compound comprises an oligomeric compound and a conjugate group, wherein the conjugate group comprises a moiety having Formula I:

[chemical structure]

wherein:

[0620] R₁ is selected from Q₁, CH₂Q₁, CH₂OH, CH₂NJ₁J₂, CH₂N₃ and CH₂SJ₃;

[0621] Q₁ is selected from aryl, substituted aryl, heterocyclic, substituted heterocyclic, heteroaryl and substituted heteroaryl;

[0622] R₂ is selected from N₃, CN, halogen, N(H)C(═O)-Q₂, substituted thiol, aryl, substituted aryl, heterocyclic, substituted heterocyclic, heteroaryl and substituted heteroaryl;

[0623] Q₂ is selected from H, C₁-C₆ alkyl, substituted C₁-C₆ alkyl, C₁-C₆ alkoxy, substituted C₁-C₆ alkoxy, aryl, substituted aryl, heterocyclic, substituted heterocyclic, heteroaryl and substituted heteroaryl;

[0624] Y is selected from O, S, CJ₄J₅, NJ₆ and N(J₆)C(═O);

[0625] J₁, J₂, J₃, J₄, J₅, and J₆ are each, independently, H or a substituent group;

[0626] each substituent group is, independently, mono or poly substituted with optionally protected substituent groups independently selected from halogen, C₁-C₆ alkyl, C₁-C₆ alkoxy, aryl, heterocyclic and heteroaryl wherein each substituent group can include a connecting group comprising a linear alkyl group optionally including one or more groups independently selected from O, S, NH and C(═O), and wherein each substituent group may be further substituted with one or more groups independently selected from C₁-C₆ alkyl, halogen or C₁-C₆ alkoxy wherein each cyclic group is mono or polycyclic; and

[0627] when Y is O and R₁ is OH then R₂ is other than OH and N(H)C(═O)CH₃.

[0628] g. Certain Conjugates

[0629] In certain embodiments, conjugate groups comprise the structural features above. In certain such embodiments, conjugate groups have the following structure:

[chemical structure]

wherein each n is, independently, from 1 to 20.

[chemical structure]

[0630] In certain such embodiments, conjugate groups have the following structure:

[chemical structure]

wherein each n is, independently, from 1 to 20;
Z is H or a linked solid support;
Q is an antisense compound;

### X is O or S; and

[0631] Bx is a heterocyclic base moiety.

[0632] In certain such embodiments, conjugate groups have the following structure:

[chemical structure]

[0633] In certain such embodiments, conjugate groups have the following structure:

[chemical structure]

[0634] In certain such embodiments, conjugate groups have the following structure:

[chemical structure]

[0635] In certain such embodiments, conjugate groups have the following structure:

[chemical structure]

[0636] In certain such embodiments, conjugate groups have the following structure:

[chemical structure]

[0637] In certain such embodiments, conjugate groups have the following structure:

[chemical structure]

[0638] In certain such embodiments, conjugate groups have the following structure:

[chemical structure]

[0639] In certain such embodiments, conjugate groups have the following structure:

[chemical structure]

[0640] In certain embodiments, conjugates do not comprise a pyrrolidine.

[0641] In certain such embodiments, conjugate groups have the following structure:

[chemical structure]

[0642] In certain such embodiments, conjugate groups have the following structure:

[chemical structure]

[0643] In certain such embodiments, conjugate groups have the following structure:

[chemical structure]

[0644] In certain such embodiments, conjugate groups have the following structure:

[chemical structure]

[0645] In certain such embodiments, conjugate groups have the following structure:

[chemical structure]

[0646] In certain such embodiments, conjugate groups have the following structure:

[chemical structure]

[0647] In certain such embodiments, conjugate groups have the following structure:

[chemical structure]

[0648] In certain such embodiments, conjugate groups have the following structure:

[chemical structure]

[0649] In certain such embodiments, conjugate groups have the following structure:

[chemical structure]

[0650] In certain such embodiments, conjugate groups have the following structure:

[chemical structure]

[0651] In certain such embodiments, conjugate groups have the following structure:

[chemical structure]

[0652] In certain embodiments, the cell-targeting moiety of the conjugate group has the following structure:

[chemical structure]

[0653] wherein X is a substituted or unsubstituted tether of six to eleven consecutively bonded atoms.

[0654] In certain embodiments, the cell-targeting moiety of the conjugate group has the following structure:

[chemical structure]

[0655] wherein X is a substituted or unsubstituted tether of ten consecutively bonded atoms.

[0656] In certain embodiments, the cell-targeting moiety of the conjugate group has the following structure:

[chemical structure]

[0657] wherein X is a substituted or unsubstituted tether of four to eleven consecutively bonded atoms and wherein the tether comprises exactly one amide bond.

[0658] In certain embodiments, the cell-targeting moiety of the conjugate group has the following structure:

[chemical structure]

[0659] wherein Y₁ and Z are independently selected from a C₁-C₁₂ substituted or unsubstituted alkyl, alkenyl, or alkynyl group, or a group comprising an ether, a ketone, an amide, an ester, a carbamate, an amine, a piperidine, a phosphate, a phosphodiester, a phosphorothioate, a triazole, a pyrrolidine, a disulfide, or a thioether.

[0660] In certain such embodiments, the cell-targeting moiety of the conjugate group has the following structure:

[chemical structure]

[0661] wherein Y₁ and Z are independently selected from a C₁-C₁₂ substituted or unsubstituted alkyl group, or a group comprising exactly one ether or exactly two ethers, an amide, an amine, a piperidine, a phosphate, a phosphodiester, or a phosphorothioate.

[0662] In certain such embodiments, the cell-targeting moiety of the conjugate group has the following structure:

[chemical structure]

[0663] wherein Y₁ and Z are independently selected from a C₁-C₁₂ substituted or unsubstituted alkyl group.

[0664] In certain such embodiments, the cell-targeting moiety of the conjugate group has the following structure:

[chemical structure]

[0665] wherein m and n are independently selected from 1, 2, 3, 4, 5, 6, 7, 8, 9, 10, 11, and 12.

[0666] In certain such embodiments, the cell-targeting moiety of the conjugate group has the following structure:

[chemical structure]

[0667] wherein m is 4, 5, 6, 7, or 8, and n is 1, 2, 3, or 4.

[0668] In certain embodiments, the cell-targeting moiety of the conjugate group has the following structure:

[chemical structure]

[0669] wherein X is a substituted or unsubstituted tether of four to thirteen consecutively bonded atoms, and wherein X does not comprise an ether group.

[0670] In certain embodiments, the cell-targeting moiety of the conjugate group has the following structure:

[chemical structure]

[0671] wherein X is a substituted or unsubstituted tether of eight consecutively bonded atoms, and wherein X does not comprise an ether group.

[0672] In certain embodiments, the cell-targeting moiety of the conjugate group has the following structure:

[chemical structure]

[0673] wherein X is a substituted or unsubstituted tether of four to thirteen consecutively bonded atoms, and wherein the tether comprises exactly one amide bond, and wherein X does not comprise an ether group.

[0674] In certain embodiments, the cell-targeting moiety of the conjugate group has the following structure:

[chemical structure]

[0675] wherein X is a substituted or unsubstituted tether of four to thirteen consecutively bonded atoms and wherein the tether consists of an amide bond and a substituted or unsubstituted C₂-C₁₁ alkyl group.

[0676] In certain embodiments, the cell-targeting moiety of the conjugate group has the following structure:

[chemical structure]

[0677] wherein Y₁ is selected from a C₁-C₁₂ substituted or unsubstituted alkyl, alkenyl, or alkynyl group, or a group comprising an ether, a ketone, an amide, an ester, a carbamate, an amine, a piperidine, a phosphate, a phosphodiester, a phosphorothioate, a triazole, a pyrrolidine, a disulfide, or a thioether.

[0678] In certain such embodiments, the cell-targeting moiety of the conjugate group has the following structure:

[chemical structure]

[0679] wherein Y₁ is selected from a C₁-C₁₂ substituted or unsubstituted alkyl group, or a group comprising an ether, an amine, a piperidine, a phosphate, a phosphodiester, or a phosphorothioate.

[0680] In certain such embodiments, the cell-targeting moiety of the conjugate group has the following structure:

[chemical structure]

[0681] wherein Y₁ is selected from a C₁-C₁₂ substituted or unsubstituted alkyl group.

[0682] In certain such embodiments, the cell-targeting moiety of the conjugate group has the following structure:

[chemical structure]

[0683] Wherein n is 1, 2, 3, 4, 5, 6, 7, 8, 9, 10, 11, or 12.

[0684] In certain such embodiments, the cell-targeting moiety of the conjugate group has the following structure:

[chemical structure]

[0685] wherein n is 4, 5, 6, 7, or 8.

[0686] h. Certain Conjugated Antisense Compounds

[0687] In certain embodiments, a compound has a structure selected from among the following:

[chemical structure]

[0688] Representative United States patents, United States patent application publications, and international patent application publications that teach the preparation of certain of the above noted conjugates, conjugated antisense compounds, tethers, linkers, branching groups, ligands, cleavable moieties as well as other modifications include without limitation, U.S. Pat. No. 5,994,517, U.S. Pat. No. 6,300,319, U.S. Pat. No. 6,660,720, U.S. Pat. No. 6,906,182, U.S. Pat. No. 7,262,177, U.S. Pat. No. 7,491,805, U.S. Pat. No. 8,106,022, U.S. Pat. No. 7,723,509, US 2006/0148740, US 2011/0123520, WO 2013/033230 and WO 2012/037254, each of which is incorporated by reference herein in its entirety.

[0689] Representative publications that teach the preparation of certain of the above noted conjugates, conjugated antisense compounds, tethers, linkers, branching groups, ligands, cleavable moieties as well as other modifications include without limitation, BIESSEN et al., “The Cholesterol Derivative of a Triantennary Galactoside with High Affinity for the Hepatic Asialoglycoprotein Receptor: a Potent Cholesterol Lowering Agent” J. Med. Chem. (1995) 38:1846-1852, BIESSEN et al., “Synthesis of Cluster Galactosides with High Affinity for the Hepatic Asialoglycoprotein Receptor” J. Med. Chem. (1995) 38:1538-1546, LEE et al., “New and more efficient multivalent glyco-ligands for asialoglycoprotein receptor of mammalian hepatocytes” Bioorganic & Medicinal Chemistry (2011) 19:2494-2500, RENSEN et al., “Determination of the Upper Size Limit for Uptake and Processing of Ligands by the Asialoglycoprotein Receptor on Hepatocytes in Vitro and in Vivo” J. Biol. Chem. (2001) 276(40):37577-37584, RENSEN et al., “Design and Synthesis of Novel N-Acetylgalactosamine-Terminated Glycolipids for Targeting of Lipoproteins to the Hepatic Asialoglycoprotein Receptor” J. Med. Chem. (2004) 47:5798-5808, SLIEDREGT et al., “Design and Synthesis of Novel Amphiphilic Dendritic Galactosides for Selective Targeting of Liposomes to the Hepatic Asialoglycoprotein Receptor” J. Med. Chem. (1999) 42:609-618, and Valentijn et al., “Solid-phase synthesis of lysine-based cluster galactosides with high affinity for the Asialoglycoprotein Receptor” Tetrahedron, 1997, 53(2), 759-770, each of which is incorporated by reference herein in its entirety.

[0690] In certain embodiments, conjugated antisense compounds comprise an RNase H based oligonucleotide (such as a gapmer) or a splice modulating oligonucleotide (such as a fully modified oligonucleotide) and any conjugate group comprising at least one, two, or three GalNAc groups. In certain embodiments a conjugated antisense compound comprises any conjugate group found in any of the following references: Lee, Carbohydr Res, 1978, 67, 509-514; Connolly et al., J Biol Chem, 1982, 257, 939-945; Pavia et al., Int J Pep Protein Res, 1983, 22, 539-548; Lee et al., Biochem, 1984, 23, 4255-4261; Lee et al., Glycoconjugate J, 1987, 4, 317-328; Toyokuni et al., Tetrahedron Lett, 1990, 31, 2673-2676; Biessen et al., J Med Chem, 1995, 38, 1538-1546; Valentijn et al., Tetrahedron, 1997, 53, 759-770; Kim et al., Tetrahedron Lett, 1997, 38, 3487-3490; Lee et al., Bioconjug Chem, 1997, 8, 762-765; Kato et al., Glycobiol, 2001, 11, 821-829; Rensen et al., J Biol Chem, 2001, 276, 37577-37584; Lee et al., Methods Enzymol, 2003, 362, 38-43; Westerlind et al., Glycoconj J, 2004, 21, 227-241; Lee et al., Bioorg Med Chem Lett, 2006, 16(19), 5132-5135; Maierhofer et al., Bioorg Med Chem, 2007, 15, 7661-7676; Khorev et al., Bioorg Med Chem, 2008, 16, 5216-5231; Lee et al., Bioorg Med Chem, 2011, 19, 2494-2500; Kornilova et al., Analyt Biochem, 2012, 425, 43-46; Pujol et al., Angew Chemie Int Ed Engl, 2012, 51, 7445-7448; Biessen et al., J Med Chem, 1995, 38, 1846-1852; Sliedregt et al., J Med Chem, 1999, 42, 609-618; Rensen et al., J Med Chem, 2004, 47, 5798-5808; Rensen et al., Arterioscler Thromb Vasc Biol, 2006, 26, 169-175; van Rossenberg et al., Gene Ther, 2004, 11, 457-464; Sato et al., J Am Chem Soc, 2004, 126, 14013-14022; Lee et al., J Org Chem, 2012, 77, 7564-7571; Biessen et al., FASEB J, 2000, 14, 1784-1792; Rajur et al., Bioconjug Chem, 1997, 8, 935-940; Duff et al., Methods Enzymol, 2000, 313, 297-321; Maier et al., Bioconjug Chem, 2003, 14, 18-29; Jayaprakash et al., Org Lett, 2010, 12, 5410-5413; Manoharan, Antisense Nucleic Acid Drug Dev, 2002, 12, 103-128; Merwin et al., Bioconjug Chem, 1994, 5, 612-620; Tomiya et al., Bioorg Med Chem, 2013, 21, 5275-5281; International applications WO1998/013381; WO2011/038356; WO1997/046098; WO2008/098788; WO2004/101619; WO2012/037254; WO2011/120053; WO2011/100131; WO2011/163121; WO2012/177947; WO2013/033230; WO2013/075035; WO2012/083185; WO2012/083046; WO2009/082607; WO2009/134487; WO2010/144740; WO2010/148013; WO1997/020563; WO2010/088537; WO2002/043771; WO2010/129709; WO2012/068187; WO2009/126933; WO2004/024757; WO2010/054406; WO2012/089352; WO2012/089602; WO2013/166121; WO2013/165816; U.S. Pat. Nos. 4,751,219; 8,552,163; 6,908,903; 7,262,177; 5,994,517; 6,300,319; 8,106,022; 7,491,805; 7,491,805; 7,582,744; 8,137,695; 6,383,812; 6,525,031; 6,660,720; 7,723,509; 8,541,548; 8,344,125; 8,313,772; 8,349,308; 8,450,467; 8,501,930; 8,158,601; 7,262,177; 6,906,182; 6,620,916; 8,435,491; 8,404,862; 7,851,615; Published U.S. Patent Application Publications US2011/0097264; US2011/0097265; US2013/0004427; US2005/0164235; US2006/0148740; US2008/0281044; US2010/0240730; US2003/0119724; US2006/0183886; US2008/0206869; US2011/0269814; US2009/0286973; US2011/0207799; US2012/0136042; US2012/0165393; US2008/0281041; US2009/0203135; US2012/0035115; US2012/0095075; US2012/0101148; US2012/0128760; US2012/0157509; US2012/0230938; US2013/0109817; US2013/0121954; US2013/0178512; US2013/0236968; US2011/0123520; US2003/0077829; US2008/0108801; and US2009/0203132; each of which is incorporated by reference in its entirety.

[0691] Certain Uses and Features

[0692] In certain embodiments, conjugated antisense compounds exhibit potent target RNA reduction in vivo. In certain embodiments, unconjugated antisense compounds accumulate in the kidney. In certain embodiments, conjugated antisense compounds accumulate in the liver. In certain embodiments, conjugated antisense compounds are well tolerated. Such properties render conjugated antisense compounds particularly useful for inhibition of many target RNAs, including, but not limited to those involved in metabolic, cardiovascular and other diseases, disorders or conditions. Thus, provided herein are methods of treating such diseases, disorders or conditions by contacting liver tissues with the conjugated antisense compounds targeted to RNAs associated with such diseases, disorders or conditions. Thus, also provided are methods for ameliorating any of a variety of metabolic, cardiovascular and other diseases, disorders or conditions with the conjugated antisense compounds of the present invention.

[0693] In certain embodiments, conjugated antisense compounds are more potent than unconjugated counterpart at a particular tissue concentration. Without wishing to be bound by any theory or mechanism, in certain embodiments, the conjugate may allow the conjugated antisense compound to enter the cell more efficiently or to enter the cell more productively. For example, in certain embodiments conjugated antisense compounds may exhibit greater target reduction as compared to its unconjugated counterpart wherein both the conjugated antisense compound and its unconjugated counterpart are present in the tissue at the same concentrations. For example, in certain embodiments conjugated antisense compounds may exhibit greater target reduction as compared to its unconjugated counterpart wherein both the conjugated antisense compound and its unconjugated counterpart are present in the liver at the same concentrations.

[0694] The in vivo data in examples 33 and 34 includes ED₅₀ values for several oligomeric compounds, each comprising the same oligonucleotide targeted to SRB-1 and one of several different conjugates. As shown below, the conjugate groups in these assays included: (1) GalNAc₃-7ₐ (a 3-sugar GalNAc conjugate group); (2) MP-Triazole-GalNAc₃-7a, also referred to herein as GalNAc₃-33ₐ (the same 3-sugar conjugate group as (1), but with a triazole modification on each GalNAc sugar); (3) GalNAc₁-25ₐ (a 1-sugar GalNAc conjugate group); and (4) GalNAc₁-34ₐ (a 1-sugar GalNAc conjugate that is an analog of GalNAc₁-25ₐ (3), but with a triazole modification on the one GalNac sugar). Structures of GalNAc₃-7ₐ and GalNAc₁-25ₐ are shown in Examples 2 and 11, respectively. Structures of GalNAc₃-33ₐ and GalNAc₁-34ₐ are shown in compounds 148 and 153a (wherein n=6) in Examples 23 and 24, respectively.

[0695] In these assays, the unmodified 1-sugar GalNAc conjugate (3) was less active than the 3-sugar unmodified GalNac conjugate (1). Thus, in these assays going from 3 sugars to 1 sugar resulted in a slight decrease in activity. Adding the triazole modification to the 3-sugar unmodified GalNac conjugate (2) did not result in significant additional activity when compared to the unmodified 3-sugar GalNAc conjugate (1). However, the triazole modification on the 1-sugar GalNAc conjugate resulted improved activity compared to the same 1-sugar conjugate lacking the triazole (3). In fact, the triazole-modified 1-sugar GalNAc conjugate had activity comparable to (and perhaps even better than) that of the 3-sugar conjugates. Thus, in these assays, triazole modification of the GalNAc sugar restored the loss of activity observed in reducing the number of sugars in the conjugate from 3 to 1.

| | | Chemistry | |
|---|---|---|---|
| | | (no cleavable | |
| ISIS No. | ED₅₀/# | nucleoside) | Sugar(s) |
| 702489/147 | 3.4/(1) | GalNAc₃-7ₐ | 3 |
| 721456/147 | 3.7/(2) | MP-Triazole- | 3 (modified) |
| | | GalNAc₃-7ₐ | |
| | | (GalNAc₃-33ₐ) | |
| 711462/147 | 4.9/(3) | GalNAc₁25ₐ | 1 |
| 727852/147 | 2.9/(4) | GalNAc₁34ₐ | 1 (modified). |

[0696] Productive and non-productive uptake of oligonucleotides has been discussed previously (See e.g. Geary, R. S., E. Wancewicz, et al. (2009). “Effect of Dose and Plasma Concentration on Liver Uptake and Pharmacologic Activity of a 2′-Methoxyethyl Modified Chimeric Antisense Oligonucleotide Targeting PTEN.” Biochem. Pharmacol. 78(3): 284-91; & Koller, E., T. M. Vincent, et al. (2011). “Mechanisms of single-stranded phosphorothioate modified antisense oligonucleotide accumulation in hepatocytes.” Nucleic Acids Res. 39(11): 4795-807). Conjugate groups described herein may improve productive uptake.

[0697] In certain embodiments, the conjugate groups described herein may further improve potency by increasing the affinity of the conjugated antisense compound for a particular type of cell or tissue. In certain embodiments, the conjugate groups described herein may further improve potency by increasing recognition of the conjugated antisense compound by one or more cell-surface receptors. In certain embodiments, the conjugate groups described herein may further improve potency by facilitating endocytosis of the conjugated antisense compound.

[0698] In certain embodiments, the cleavable moiety may further improve potency by allowing the conjugate to be cleaved from the antisense oligonucleotide after the conjugated antisense compound has entered the cell. Accordingly, in certain embodiments, conjugated antisense compounds can be administered at doses lower than would be necessary for unconjugated antisense oligonucleotides.

[0699] Phosphorothioate linkages have been incorporated into antisense oligonucleotides previously. Such phosphorothioate linkages are resistant to nucleases and so improve stability of the oligonucleotide. Further, phosphorothioate linkages also bind certain proteins, which results in accumulation of antisense oligonucleotide in the liver. Oligonucleotides with fewer phosphorothioate linkages accumulate less in the liver and more in the kidney (see, for example, Geary, R., “Pharmacokinetic Properties of 2′-O-(2-Methoxyethyl)-Modified Oligonucleotide Analogs in Rats,” Journal of Pharmacology and Experimental Therapeutics, Vol. 296, No. 3, 890-897; & Pharmacological Properties of 2′-O-Methoxyethyl Modified Oligonucleotides in Antisense a Drug Technology, Chapter 10, Crooke, S. T., ed., 2008) In certain embodiments, oligonucleotides with fewer phosphorothioate internucleoside linkages and more phosphodiester internucleoside linkages accumulate less in the liver and more in the kidney. When treating diseases in the liver, this is undesirable for several reasons (1) less drug is getting to the site of desired action (liver); (2) drug is escaping into the urine; and (3) the kidney is exposed to relatively high concentration of drug which can result in toxicities in the kidney. Thus, for liver diseases, phosphorothioate linkages provide important benefits.

[0700] In certain embodiments, however, administration of oligonucleotides uniformly linked by phosphoro-thioate internucleoside linkages induces one or more proinflammatory reactions. (see for example: J Lab Clin Med. 1996 September; 128(3):329-38. “Amplification of antibody production by phosphorothioate oligodeoxynucleotides”. Branda et al.; and see also for example: Toxicologic Properties in Antisense a Drug Technology, Chapter 12, pages 342-351, Crooke, S. T., ed., 2008). In certain embodiments, administration of oligonucleotides wherein most of the internucleoside linkages comprise phosphorothioate internucleoside linkages induces one or more proinflammatory reactions.

[0701] In certain embodiments, the degree of proinflammatory effect may depend on several variables (e.g. backbone modification, off-target effects, nucleobase modifications, and/or nucleoside modifications) see for example: Toxicologic Properties in Antisense a Drug Technology, Chapter 12, pages 342-351, Crooke, S. T., ed., 2008). In certain embodiments, the degree of proinflammatory effect may be mitigated by adjusting one or more variables. For example the degree of proinflammatory effect of a given oligonucleotide may be mitigated by replacing any number of phosphorothioate internucleoside linkages with phosphodiester internucleoside linkages and thereby reducing the total number of phosphorothioate internucleoside linkages.

[0702] In certain embodiments, it would be desirable to reduce the number of phosphorothioate linkages, if doing so could be done without losing stability and without shifting the distribution from liver to kidney. For example, in certain embodiments, the number of phosphorothioate linkages may be reduced by replacing phosphorothioate linkages with phosphodiester linkages. In such an embodiment, the antisense compound having fewer phosphorothioate linkages and more phosphodiester linkages may induce less proinflammatory reactions or no proinflammatory reaction. Although the antisense compound having fewer phosphorothioate linkages and more phosphodiester linkages may induce fewer proinflammatory reactions, the antisense compound having fewer phosphorothioate linkages and more phosphodiester linkages may not accumulate in the liver and may be less efficacious at the same or similar dose as compared to an antisense compound having more phosphorothioate linkages. In certain embodiments, it is therefore desirable to design an antisense compound that has a plurality of phosphodiester bonds and a plurality of phosphorothioate bonds but which also possesses stability and good distribution to the liver.

[0703] In certain embodiments, conjugated antisense compounds accumulate more in the liver and less in the kidney than unconjugated counterparts, even when some of the phosphorothioate linkages are replaced with less proinflammatory phosphodiester internucleoside linkages. In certain embodiments, conjugated antisense compounds accumulate more in the liver and are not excreted as much in the urine compared to its unconjugated counterparts, even when some of the phosphorothioate linkages are replaced with less proinflammatory phosphodiester internucleoside linkages. In certain embodiments, the use of a conjugate allows one to design more potent and better tolerated antisense drugs. Indeed, in certain embodiments, conjugated antisense compounds have larger therapeutic indexes than unconjugated counterparts. This allows the conjugated antisense compound to be administered at a higher absolute dose, because there is less risk of proinflammatory response and less risk of kidney toxicity. This higher dose, allows one to dose less frequently, since the clearance (metabolism) is expected to be similar. Further, because the compound is more potent, as described above, one can allow the concentration to go lower before the next dose without losing therapeutic activity, allowing for even longer periods between dosing.

[0704] In certain embodiments, the inclusion of some phosphorothioate linkages remains desirable. For example, the terminal linkages are vulnerable to exonucleases and so in certain embodiments, those linkages are phosphorothioate or other modified linkage. Internucleoside linkages linking two deoxynucleosides are vulnerable to endonucleases and so in certain embodiments those linkages are phosphorothioate or other modified linkage. Internucleoside linkages between a modified nucleoside and a deoxynucleoside where the deoxynucleoside is on the 5′ side of the linkage deoxynucleosides are vulnerable to endonucleases and so in certain embodiments those linkages are phosphorothioate or other modified linkage. Internucleoside linkages between two modified nucleosides of certain types and between a deoxynucleoside and a modified nucleoside of certain type where the modified nucleoside is at the 5′ side of the linkage are sufficiently resistant to nuclease digestion, that the linkage can be phosphodiester.

[0705] In certain embodiments, the antisense oligonucleotide of a conjugated antisense compound comprises fewer than 16 phosphorothioate linkages. In certain embodiments, the antisense oligonucleotide of a conjugated antisense compound comprises fewer than 15 phosphorothioate linkages. In certain embodiments, the antisense oligonucleotide of a conjugated antisense compound comprises fewer than 14 phosphorothioate linkages. In certain embodiments, the antisense oligonucleotide of a conjugated antisense compound comprises fewer than 13 phosphorothioate linkages. In certain embodiments, the antisense oligonucleotide of a conjugated antisense compound comprises fewer than 12 phosphorothioate linkages. In certain embodiments, the antisense oligonucleotide of a conjugated antisense compound comprises fewer than 11 phosphorothioate linkages. In certain embodiments, the antisense oligonucleotide of a conjugated antisense compound comprises fewer than 10 phosphorothioate linkages. In certain embodiments, the antisense oligonucleotide of a conjugated antisense compound comprises fewer than 9 phosphorothioate linkages. In certain embodiments, the antisense oligonucleotide of a conjugated antisense compound comprises fewer than 8 phosphorothioate linkages.

[0706] In certain embodiments, antisense compounds comprising one or more conjugate group described herein has increased activity and/or potency and/or tolerability compared to a parent antisense compound lacking such one or more conjugate group. Accordingly, in certain embodiments, attachment of such conjugate groups to an oligonucleotide is desirable. Such conjugate groups may be attached at the 5′-, and/or 3′-end of an oligonucleotide. In certain instances, attachment at the 5′-end is synthetically desirable. Typically, oligonucleotides are synthesized by attachment of the 3′ terminal nucleoside to a solid support and sequential coupling of nucleosides from 3′ to 5′ using techniques that are well known in the art. Accordingly if a conjugate group is desired at the 3′-terminus, one may (1) attach the conjugate group to the 3′-terminal nucleoside and attach that conjugated nucleoside to the solid support for subsequent preparation of the oligonucleotide or (2) attach the conjugate group to the 3′-terminal nucleoside of a completed oligonucleotide after synthesis. Neither of these approaches is very efficient and thus both are costly. In particular, attachment of the conjugated nucleoside to the solid support, while demonstrated in the Examples herein, is an inefficient process. In certain embodiments, attaching a conjugate group to the 5′-terminal nucleoside is synthetically easier than attachment at the 3′-end. One may attach a non-conjugated 3′ terminal nucleoside to the solid support and prepare the oligonucleotide using standard and well characterized reactions. One then needs only to attach a 5′nucleoside having a conjugate group at the final coupling step. In certain embodiments, this is more efficient than attaching a conjugated nucleoside directly to the solid support as is typically done to prepare a 3′-conjugated oligonucleotide. The Examples herein demonstrate attachment at the 5′-end. In addition, certain conjugate groups have synthetic advantages. For Example, certain conjugate groups comprising phosphorus linkage groups are synthetically simpler and more efficiently prepared than other conjugate groups, including conjugate groups reported previously (e.g., WO/2012/037254).

[0707] In certain embodiments, conjugated antisense compounds are administered to a subject. In such embodiments, antisense compounds comprising one or more conjugate group described herein has increased activity and/or potency and/or tolerability compared to a parent antisense compound lacking such one or more conjugate group. Without being bound by mechanism, it is believed that the conjugate group helps with distribution, delivery, and/or uptake into a target cell or tissue. In certain embodiments, once inside the target cell or tissue, it is desirable that all or part of the conjugate group to be cleaved to release the active oligonucleotide. In certain embodiments, it is not necessary that the entire conjugate group be cleaved from the oligonucleotide. For example, in Example 32 a conjugated oligonucleotide was administered to mice and a number of different chemical species, each comprising a different portion of the conjugate group remaining on the oligonucleotide, were detected (Table 32). This conjugated antisense compound demonstrated good potency (Table 31). Thus, in certain embodiments, such metabolite profile of multiple partial cleavage of the conjugate group does not interfere with activity/potency. Nevertheless, in certain embodiments it is desirable that a prodrug (conjugated oligonucleotide) yield a single active compound. In certain instances, if multiple forms of the active compound are found, it may be necessary to determine relative amounts and activities for each one. In certain embodiments where regulatory review is required (e.g., USFDA or counterpart) it is desirable to have a single (or predominantly single) active species. In certain such embodiments, it is desirable that such single active species be the antisense oligonucleotide lacking any portion of the conjugate group. In certain embodiments, conjugate groups at the 5′-end are more likely to result in complete metabolism of the conjugate group. Without being bound by mechanism it may be that endogenous enzymes responsible for metabolism at the 5′ end (e.g., 5′ nucleases) are more active/efficient than the 3′ counterparts. In certain embodiments, the specific conjugate groups are more amenable to metabolism to a single active species. In certain embodiments, certain conjugate groups are more amenable to metabolism to the oligonucleotide.

### D. Antisense

[0708] In certain embodiments, oligomeric compounds of the present invention are antisense compounds. In such embodiments, the oligomeric compound is complementary to a target nucleic acid. In certain embodiments, a target nucleic acid is an RNA. In certain embodiments, a target nucleic acid is a non-coding RNA. In certain embodiments, a target nucleic acid encodes a protein. In certain embodiments, a target nucleic acid is selected from a mRNA, a pre-mRNA, a microRNA, a non-coding RNA, including small non-coding RNA, and a promoter-directed RNA. In certain embodiments, oligomeric compounds are at least partially complementary to more than one target nucleic acid. For example, oligomeric compounds of the present invention may be microRNA mimics, which typically bind to multiple targets.

[0709] In certain embodiments, antisense compounds comprise a portion having a nucleobase sequence at least 70% complementary to the nucleobase sequence of a target nucleic acid. In certain embodiments, antisense compounds comprise a portion having a nucleobase sequence at least 80% complementary to the nucleobase sequence of a target nucleic acid. In certain embodiments, antisense compounds comprise a portion having a nucleobase sequence at least 90% complementary to the nucleobase sequence of a target nucleic acid. In certain embodiments, antisense compounds comprise a portion having a nucleobase sequence at least 95% complementary to the nucleobase sequence of a target nucleic acid. In certain embodiments, antisense compounds comprise a portion having a nucleobase sequence at least 98% complementary to the nucleobase sequence of a target nucleic acid. In certain embodiments, antisense compounds comprise a portion having a nucleobase sequence that is 100% complementary to the nucleobase sequence of a target nucleic acid. In certain embodiments, antisense compounds are at least 70%, 80%, 90%, 95%, 98%, or 100% complementary to the nucleobase sequence of a target nucleic acid over the entire length of the antisense compound.

[0710] Antisense mechanisms include any mechanism involving the hybridization of an oligomeric compound with target nucleic acid, wherein the hybridization results in a biological effect. In certain embodiments, such hybridization results in either target nucleic acid degradation or occupancy with concomitant inhibition or stimulation of the cellular machinery involving, for example, translation, transcription, or polyadenylation of the target nucleic acid or of a nucleic acid with which the target nucleic acid may otherwise interact.

[0711] One type of antisense mechanism involving degradation of target RNA is RNase H mediated antisense. RNase H is a cellular endonuclease which cleaves the RNA strand of an RNA:DNA duplex. It is known in the art that single-stranded antisense compounds which are “DNA-like” elicit RNase H activity in mammalian cells. Activation of RNase H, therefore, results in cleavage of the RNA target, thereby greatly enhancing the efficiency of DNA-like oligonucleotide-mediated inhibition of gene expression.

[0712] Antisense mechanisms also include, without limitation RNAi mechanisms, which utilize the RISC pathway. Such RNAi mechanisms include, without limitation siRNA, ssRNA and microRNA mechanisms. Such mechanisms include creation of a microRNA mimic and/or an anti-microRNA.

[0713] Antisense mechanisms also include, without limitation, mechanisms that hybridize or mimic non-coding RNA other than microRNA or mRNA. Such non-coding RNA includes, but is not limited to promoter-directed RNA and short and long RNA that effects transcription or translation of one or more nucleic acids.

[0714] In certain embodiments, oligonucleotides comprising conjugates described herein are RNAi compounds. In certain embodiments, oligomeric oligonucleotides comprising conjugates described herein are ssRNA compounds. In certain embodiments, oligonucleotides comprising conjugates described herein are paired with a second oligomeric compound to form an siRNA. In certain such embodiments, the second oligomeric compound also comprises a conjugate. In certain embodiments, the second oligomeric compound is any modified or unmodified nucleic acid. In certain embodiments, the oligonucleotides comprising conjugates described herein is the antisense strand in an siRNA compound. In certain embodiments, the oligonucleotides comprising conjugates described herein is the sense strand in an siRNA compound. In embodiments in which the conjugated oligomeric compound is double-stranded siRNA, the conjugate may be on the sense strand, the antisense strand or both the sense strand and the antisense strand.

### E. Target Nucleic Acids, Regions and Segments

[0715] In certain embodiments, conjugated antisense compounds target any nucleic acid. In certain embodiments, the target nucleic acid encodes a target protein that is clinically relevant. In such embodiments, modulation of the target nucleic acid results in clinical benefit. Certain target nucleic acids include, but are not limited to, the target nucleic acids illustrated in Table 1.

TABLE 1
Certain Target Nucleic Acids

| | | GENBANK ® Accession | SEQ ID |
|---|---|---|---|
| Target | Species | Number | NO |
| Androgen | Human | NT_011669.17 truncated | 1 |
| Receptor (AR) | | from nucleobases | |
| | | 5079000 to 5270000 | |
| Apolipoprotein | Human | NM_005577.2 | 2 |
| (a) (Apo(a)) | | | |
| Apolipoprotein | Human | NM_000384.1 | 3 |
| B (ApoB) | | | |
| Apolipoprotein | Human | NT_033899.8 truncated | 4 |
| C-III (ApoCIII) | | from nucleobases | |
| | | 20262640 to 20266603 | |
| Apolipoprotein | Human | NM_000040.1 | 5 |
| C-III (ApoCIII) | | | |
| C-Reactive | Human | M11725.1 | 6 |
| Protein (CRP) | | | |
| eIF4E | Human | M15353.1 | 7 |
| Factor VII | Human | NT_027140.6 truncated | 8 |
| | | from nucleobases | |
| | | 1255000 to 1273000 | |
| Factor XI | Human | NM_000128.3 | 9 |
| Glucocorticoid | Human | the complement | 10 |
| Receptor (GCCR) | | NT_029289.10 truncated | |
| | | from nucleobases | |
| | | 3818000 to 3980000 | |
| Glucagon | Human | NW_926918.1 truncated | 11 |
| Receptor (GCGR) | | from nucleobases | |
| | | 16865000 to 16885000 | |
| HBV | Human | U95551.1 | 12 |
| Protein Tyrosine | Human | NM_002827.2 | 13 |
| Phosphatase 1B | | | |
| (PTP1B) | | | |
| Protein Tyrosine | Human | NT_011362.9 truncated | 14 |
| Phosphatase 1B | | from nucleobases | |
| (PTP1B) | | 14178000 to 14256000 | |
| STAT3 | Human | NM_139276.2 | 15 |
| Transthyretin | Human | NM_000371.3 | 16 |
| (TTR) | | | |

[0716] The targeting process usually includes determination of at least one target region, segment, or site within the target nucleic acid for the antisense interaction to occur such that the desired effect will result.

[0717] In certain embodiments, a target region is a structurally defined region of the nucleic acid. For example, in certain such embodiments, a target region may encompass a 3′ UTR, a 5′ UTR, an exon, an intron, a coding region, a translation initiation region, translation termination region, or other defined nucleic acid region or target segment.

[0718] In certain embodiments, a target segment is at least about an 8-nucleobase portion of a target region to which a conjugated antisense compound is targeted. Target segments can include DNA or RNA sequences that comprise at least 8 consecutive nucleobases from the 5′-terminus of one of the target segments (the remaining nucleobases being a consecutive stretch of the same DNA or RNA beginning immediately upstream of the 5′-terminus of the target segment and continuing until the DNA or RNA comprises about 8 to about 30 nucleobases). Target segments are also represented by DNA or RNA sequences that comprise at least 8 consecutive nucleobases from the 3′-terminus of one of the target segments (the remaining nucleobases being a consecutive stretch of the same DNA or RNA beginning immediately downstream of the 3′-terminus of the target segment and continuing until the DNA or RNA comprises about 8 to about 30 nucleobases). Target segments can also be represented by DNA or RNA sequences that comprise at least 8 consecutive nucleobases from an internal portion of the sequence of a target segment, and may extend in either or both directions until the conjugated antisense compound comprises about 8 to about 30 nucleobases.

[0719] In certain embodiments, antisense compounds targeted to the nucleic acids listed in Table 1 can be modified as described herein. In certain embodiments, the antisense compounds can have a modified sugar moiety, an unmodified sugar moiety or a mixture of modified and unmodified sugar moieties as described herein. In certain embodiments, the antisense compounds can have a modified internucleoside linkage, an unmodified internucleoside linkage or a mixture of modified and unmodified internucleoside linkages as described herein. In certain embodiments, the antisense compounds can have a modified nucleobase, an unmodified nucleobase or a mixture of modified and unmodified nucleobases as described herein. In certain embodiments, the antisense compounds can have a motif as described herein. In certain embodiments, antisense compounds targeted to the nucleic acids listed in Table 1 can be conjugated as described herein.

[0720] 1. Androgen Receptor (AR)

[0721] AR is a transcription factor implicated as a driver of prostate cancer. AR is activated by binding to its hormone ligands: androgen, testosterone, and/or DHT. Androgen deprivation therapy, also known as “chemical castration,” is a first-line treatment strategy against hormone-sensitive, androgen-dependent prostate cancer that reduces circulating androgen levels and thereby inhibits AR activity. However, androgen deprivation therapy frequently leads to the emergence and growth of “castration-resistant” advanced prostate cancer, in which AR signaling is reactivated independent of ligand binding. The mechanisms underlying castration resistance in advanced prostate cancer remain unclear.

### Certain Conjugated Antisense Compounds Targeted to an AR Nucleic Acid

[0722] In certain embodiments, conjugated antisense compounds are targeted to an AR nucleic acid having the sequence of GENBANK® Accession No. NT_011669.17 nucleobases 5079000 to 5270000, incorporated herein as SEQ ID NO: 1. In certain such embodiments, a conjugated antisense compound is at least 90%, at least 95%, or 100% complementary to SEQ ID NO: 1.

[0723] In certain embodiments, a conjugated antisense compound targeted to SEQ ID NO: 1 comprises an at least 8 consecutive nucleobase sequence selected from the nucleobase sequence of any of SEQ ID NOs: 17-24. In certain embodiments, a conjugated antisense compound targeted to SEQ ID NO: 1 comprises a nucleobase sequence selected from the nucleobase sequence of any of SEQ ID NOs: 17-24. In certain embodiments, such conjugated antisense compounds comprise a conjugate comprising 1-3 GalNAc ligands. In certain embodiments, such antisense compounds comprise a conjugate disclosed herein.

TABLE 2
Antisense Compounds Targeted to AR SEQ ID NO: 1

| | Target Start | | | SEQ ID |
|---|---|---|---|---|
| ISIS No | Site | Sequence | Motif | NO |
| 560131 | 58721 | TTGATTTAATGGTTGC | kkkdddddddddkkke | 17 |
| | 58751 | | | |
| 569213 | 58720 | TGATTTAATGGTTGCA | kkkdddddddddkkke | 18 |
| | 58750 | | | |
| 569216 | 58720 | TGATTTAATGGTTGCA | ekkkddddddddkkke | 18 |
| | 58750 | | | |
| 569221 | 58720 | TGATTTAATGGTTGCA | eekkkddddddddkkk | 18 |
| | 58750 | | | |
| 569236 | 58720 | TGATTTAATGGTTGCA | ekkkdddddddkkkee | 18 |
| | 58750 | | | |
| 579671 | 58721 | TTGATTTAATGGTTGC | ekkekkdddddddkkk | 17 |
| | 58751 | | | |
| 586124 | 58719 | GATTTAATGGTTGCAA | kkkddddddddddkkk | 19 |
| 583918 | 5052 | AGTCGCGACTCTGGTA | kkkddddddddddkkk | 20 |
| 584149 | 8638 | GTCAATATCAAAGCAC | kkkddddddddddkkk | 21 |
| 584163 | 11197 | GAACATTATTAGGCTA | kkkddddddddddkkk | 22 |
| 584269 | 40615 | CCTTATGGATGCTGCT | kkkddddddddddkkk | 23 |
| 584468 | 115272 | CATTGTACTATGCCAG | kkkddddddddddkkk | 24 |

### AR Therapeutic Indications

[0724] In certain embodiments, the invention provides methods for using a conjugated antisense compound targeted to an AR nucleic acid for modulating the expression of AR in a subject. In certain embodiments, the expression of AR is reduced.

[0725] In certain embodiments, the invention provides methods for using a conjugated antisense compound targeted to an AR nucleic acid in a pharmaceutical composition for treating a subject. In certain embodiments, the subject has prostate cancer, such as castration-resistant prostate cancer. In certain embodiments, the subject has prostate cancer resistant to a diarylhydantoin Androgen Receptor (AR) inhibitor, such as MDV3100, which is also known as Enzalutamide. MDV3100 or Enzalutamide is an experimental androgen receptor antagonist drug developed by Medivation for the treatment of castration-resistant prostate cancer. In certain embodiments, the subject has breast cancer. In certain aspects, the subject's breast cancer can have one or more of the following characteristics: Androgen Receptor positive, dependent on androgen for growth, Estrogen Receptor (ER) negative, independent of estrogen for growth, Progesterone Receptor (PR) negative, independent of progesterone for growth, or Her2/neu negative. In certain aspects, the breast cancer or breast cancer cell is apocrine.

[0726] In certain embodiments, the invention provides methods for using a conjugated antisense compound targeted to an AR nucleic acid in the preparation of a medicament.

[0727] 2. Apolipoprotein (a) (Apo(a))

[0728] One Apo(a) protein is linked via a disulfide bond to a single ApoB protein to form a lipoprotein(a) (Lp(a)) particle. The Apo(a) protein shares a high degree of homology with plasminogen particularly within the kringle IV type 2 repetitive domain. It is thought that the kringle repeat domain in Apo(a) may be responsible for its pro-thrombotic and anti-fibrinolytic properties, potentially enhancing atherosclerotic progression. Apo(a) is transcriptionally regulated by IL-6 and in studies in rheumatoid arthritis patients treated with an IL-6 inhibitor (tocilizumab), plasma levels were reduced by 30% after 3 month treatment. Apo(a) has been shown to preferentially bind oxidized phospholipids and potentiate vascular inflammation. Further, studies suggest that the Lp(a) particle may also stimulate endothelial permeability, induce plasminogen activator inhibitor type-1 expression and activate macrophage interleukin-8 secretion. Importantly, recent genetic association studies revealed that Lp(a) was an independent risk factor for myocardial infarction, stroke, peripheral vascular disease and abdominal aortic aneurysm. Further, in the Precocious Coronary Artery Disease (PROCARDIS) study, Clarke et al. described robust and independent associations between coronary heart disease and plasma Lp(a) concentrations. Additionally, Solfrizzi et al., suggested that increased serum Lp(a) may be linked to an increased risk for Alzheimer's Disease (AD). Antisense compounds targeting Apo(a) have been previously disclosed in WO2005/000201 and U.S. 61/651,539, herein incorporated by reference in its entirety. An antisense oligonucleotide targeting Apo(a), ISIS-APOA_{Rx}, is currently in a Phase I clinical trial to study its safety profile.

### Certain Conjugated Antisense Compounds Targeted to an Apo(a) Nucleic Acid

[0729] In certain embodiments, conjugated antisense compounds are targeted to an Apo(a) nucleic acid having the sequence of GENBANK® Accession No. NM_005577.2, incorporated herein as SEQ ID NO: 2. In certain such embodiments, a conjugated antisense compound is at least 90%, at least 95%, or 100% complementary to SEQ ID NO: 2.

[0730] In certain embodiments, a conjugated antisense compound targeted to SEQ ID NO: 2 comprises an at least 8 consecutive nucleobase sequence selected from the nucleobase sequence of any of SEQ ID NOs: 25-30. In certain embodiments, a conjugated antisense compound targeted to SEQ ID NO: 2 comprises a nucleobase sequence selected from the nucleobase sequence of any of SEQ ID NOs: 25-30. In certain embodiments, such conjugated antisense compounds comprise a conjugate comprising 1-3 GalNAc ligands. In certain embodiments, such antisense compounds comprise a conjugate disclosed herein.

TABLE 3
Antisense Compounds targeted to Apo(a) SEQ ID NO: 2

| | | | | SEQ |
|---|---|---|---|---|
| | Target Start | | | ID |
| ISIS No | Site | Sequence (5′-3′) | Motif | NO |
| 494372 | 3901 | TGCTCCGTTGGTGCTTGTTC | eeeeeddddddddddeeeee | 25 |
| 494283 | 584 | TCTTCCTGTGACAGTGGTGG | eeeeeddddddddddeeeee | 26 |
| | 926 | | | |
| | 1610 | | | |
| | 1952 | | | |
| | 2294 | | | |
| | 3320 | | | |
| 494284 | 585 | TTCTTCCTGTGACAGTGGTG | eeeeeddddddddddeeeee | 27 |
| | 927 | | | |
| | 1611 | | | |
| | 494284 | | | |
| | 1953 | | | |
| | 2295 | | | |
| | 3321 | | | |
| 494286 | 587 | GGTTCTTCCTGTGACAGTGG | eeeeeddddddddddeeeee | 28 |
| | 929 | | | |
| | 1613 | | | |
| | 1955 | | | |
| | 2297 | | | |
| 494301 | 628 | CGACTATGCGAGTGTGGTGT | eeeeeddddddddddeeeee | 29 |
| | 970 | | | |
| | 1312 | | | |
| | 1654 | | | |
| | 1996 | | | |
| | 2338 | | | |
| | 2680 | | | |
| | 3022 | | | |
| 494302 | 629 | CCGACTATGCGAGTGTGGTG | eeeeeddddddddddeeeee | 30 |
| | 971 | | | |
| | 1313 | | | |
| | 1655 | | | |
| | 1997 | | | |
| | 2339 | | | |
| | 2681 | | | |
| | 3023 | | | |

### Apo(a) Therapeutic Indications

[0731] In certain embodiments, the invention provides methods for using a conjugated antisense compound targeted to an Apo(a) nucleic acid for modulating the expression of Apo(a) in a subject. In certain embodiments, the expression of Apo(a) is reduced.

[0732] In certain embodiments, the invention provides methods for using a conjugated antisense compound targeted to an Apo(a) nucleic acid in a pharmaceutical composition for treating a subject. In certain embodiments, the subject has a cardiovascular and/or metabolic disease, disorder or condition. In certain embodiments, the subject has hypercholesterolemia, non-familial hypercholesterolemia, familial hypercholesterolemia, heterozygous familial hypercholesterolemia, homozygous familial hypercholesterolemia, mixed dyslipidemia, atherosclerosis, a risk of developing atherosclerosis, coronary heart disease, a history of coronary heart disease, early onset coronary heart disease, one or more risk factors for coronary heart disease, type II diabetes, type II diabetes with dyslipidemia, dyslipidemia, hypertriglyceridemia, hyperlipidemia, hyperfattyacidemia, hepatic steatosis, non-alcoholic steatohepatitis, and/or non-alcoholic fatty liver disease.

[0733] In certain embodiments, the invention provides methods for using a conjugated antisense compound targeted to an Apo(a) nucleic acid in the preparation of a medicament.

[0734] 3. Apolipoprotein B (ApoB)

[0735] ApoB (also known as apolipoprotein B-100; ApoB-100, apolipoprotein B-48; ApoB-48 and Ag(x) antigen), is a large glycoprotein that serves an indispensable role in the assembly and secretion of lipids and in the transport and receptor-mediated uptake and delivery of distinct classes of lipoproteins. ApoB performs a variety of activities, from the absorption and processing of dietary lipids to the regulation of circulating lipoprotein levels (Davidson and Shelness, Annu. Rev. Nutr., 2000, 20, 169-193). This latter property underlies its relevance in terms of atherosclerosis susceptibility, which is highly correlated with the ambient concentration of ApoB-containing lipoproteins (Davidson and Shelness, Annu. Rev. Nutr., 2000, 20, 169-193). ApoB-100 is the major protein component of LDL-C and contains the domain required for interaction of this lipoprotein species with the LDL receptor. Elevated levels of LDL-C are a risk factor for cardiovascular disease, including atherosclerosis. Antisense compounds targeting ApoB have been previously disclosed in WO2004/044181, herein incorporated by reference in its entirety. An antisense oligonucleotide targeting ApoB, KYNAMRO™, has been approved by the U.S. Food and Drug Administration (FDA) as an adjunct treatment to lipid-lowering medications and diet to reduce low density lipoprotein-cholesterol (LDL-C), ApoB, total cholesterol (TC), and non-high density lipoprotein-cholesterol (non HDL-C) in patients with homozygous familial hypercholesterolemia (HoFH). However, there is still a need to provide patients with additional and more potent treatment options.

### Certain Conjugated Antisense Compounds Targeted to an ApoB Nucleic Acid

[0736] In certain embodiments, conjugated antisense compounds are targeted to an ApoB nucleic acid having the sequence of GENBANK® Accession No. NM_000384.1, incorporated herein as SEQ ID NO: 3. In certain such embodiments, a conjugated antisense compound is at least 90%, at least 95%, or 100% complementary to SEQ ID NO: 3.

[0737] In certain embodiments, a conjugated antisense compound targeted to SEQ ID NO: 3 comprises an at least 8 consecutive nucleobase sequence of SEQ ID NO: 31. In certain embodiments, a conjugated antisense compound targeted to SEQ ID NO: 3 comprises a nucleobase sequence of SEQ ID NO: 31. In certain embodiments, such conjugated antisense compounds comprise a conjugate comprising 1-3 GalNAc ligands. In certain embodiments, such antisense compounds comprise a conjugate disclosed herein.

TABLE 4
Antisense Compounds targeted to ApoB SEQ ID NO: 3

| | Target | | | SEQ ID |
|---|---|---|---|---|
| ISIS No | Start Site | Sequence (5′-3′) | Motif | NO |
| 301012 | 3249 | GCCTCAGTCTGCTTCGCACC | eeeeeddddddddddeeeee | 31 |

### ApoB Therapeutic Indications

[0738] In certain embodiments, the invention provides methods for using a conjugated antisense compound targeted to an ApoB nucleic acid for modulating the expression of ApoB in a subject. In certain embodiments, the expression of ApoB is reduced.

[0739] In certain embodiments, the invention provides methods for using a conjugated antisense compound targeted to an ApoB nucleic acid in a pharmaceutical composition for treating a subject. In certain embodiments, the subject has a cardiovascular and/or metabolic disease, disorder or condition. In certain embodiments, the subject has hypercholesterolemia, non-familial hypercholesterolemia, familial hypercholesterolemia, heterozygous familial hypercholesterolemia, homozygous familial hypercholesterolemia, mixed dyslipidemia, atherosclerosis, a risk of developing atherosclerosis, coronary heart disease, a history of coronary heart disease, early onset coronary heart disease, one or more risk factors for coronary heart disease, type II diabetes, type II diabetes with dyslipidemia, dyslipidemia, hypertriglyceridemia, hyperlipidemia, hyperfattyacidemia, hepatic steatosis, non-alcoholic steatohepatitis, and/or non-alcoholic fatty liver disease.

[0740] In certain embodiments, the invention provides methods for using a conjugated antisense compound targeted to an ApoB nucleic acid in the preparation of a medicament.

[0741] 4. Apolipoprotein C-III (ApoCIII)

[0742] ApoCIII is a constituent of HDL and of triglyceride (TG)-rich lipoproteins. Elevated ApoCIII levels are associated with elevated TG levels and diseases such as cardiovascular disease, metabolic syndrome, obesity and diabetes. Elevated TG levels are associated with pancreatitis. ApoCIII slows clearance of TG-rich lipoproteins by inhibiting lipolysis through inhibition of lipoprotein lipase (LPL) and through interfering with lipoprotein binding to cell-surface glycosaminoglycan matrix. Antisense compounds targeting ApoCIII have been previously disclosed in WO2004/093783 and WO2012/149495, each herein incorporated by reference in its entirety. Currently, an antisense oligonucleotide targeting ApoCIII, ISIS-APOCIII_{Rx}, is in Phase II clinical trials to assess its effectiveness in the treatment of diabetes or hypertriglyceridemia. However, there is still a need to provide patients with additional and more potent treatment options.

### Certain Conjugated Antisense Compounds Targeted to an ApoCIII Nucleic Acid

[0743] In certain embodiments, conjugated antisense compounds are targeted to an ApoCIII nucleic acid having the sequence of GENBANK® Accession No. NT_033899.8 truncated from nucleobases 20262640 to 20266603, incorporated herein as SEQ ID NO: 4. In certain such embodiments, a conjugated antisense compound is at least 90%, at least 95%, or 100% complementary to SEQ ID NO: 4. In certain embodiments, such conjugated antisense compounds comprise a conjugate comprising 1-3 GalNAc ligands. In certain embodiments, such antisense compounds comprise a conjugate disclosed herein.

[0744] In certain embodiments, conjugated antisense compounds are targeted to an ApoCIII nucleic acid having the sequence of GENBANK® Accession No. NM_000040.1, incorporated herein as SEQ ID NO: 5. In certain such embodiments, a conjugated antisense compound is at least 90%, at least 95%, or 100% complementary to SEQ ID NO: 5. In certain embodiments, such conjugated antisense compounds comprise a conjugate comprising 1-3 GalNAc ligands. In certain embodiments, such antisense compounds comprise a conjugate disclosed herein.

[0745] In certain embodiments, a conjugated antisense compound targeted to SEQ ID NO: 5 comprises an at least 8 consecutive nucleobase sequence of SEQ ID NO: 32. In certain embodiments, a conjugated antisense compound targeted to SEQ ID NO: 5 comprises a nucleobase sequence of SEQ ID NO: 32. In certain embodiments, such conjugated antisense compounds comprise a conjugate comprising 1-3 GalNAc ligands. In certain embodiments, such antisense compounds comprise a conjugate disclosed herein.

TABLE 5
Antisense Compounds targeted to ApoCIII SEQ ID NO: 5

| | Target | | | SEQ ID |
|---|---|---|---|---|
| ISIS No | Start Site | Sequence (5′-3′) | Motif | NO |
| 304801 | 508 | AGCTTCTTGTCCAGCTTTAT | eeeeeddddddddddeeeee | 32 |
| 647535 | 508 | AGCTTCTTGTCCAGCTTTAT | eeeeeddddddddddeeeeeod | 32 |
| 616468 | 508 | AGCTTCTTGTCCAGCTTTAT | eeeeeddddddddddeeeee | 32 |
| 647536 | 508 | AGCTTCTTGTCCAGCTTTAT | eeoeoeoeoddddddddddeoeoe | 32 |
| | | | eeod | |

### ApoCIII Therapeutic Indications

[0746] In certain embodiments, the invention provides methods for using a conjugated antisense compound targeted to an ApoCIII nucleic acid for modulating the expression of ApoCIII in a subject. In certain embodiments, the expression of ApoCIII is reduced.

[0747] In certain embodiments, the invention provides methods for using a conjugated antisense compound targeted to an ApoCIII nucleic acid in a pharmaceutical composition for treating a subject. In certain embodiments, the subject has a cardiovascular and/or metabolic disease, disorder or condition. In certain embodiments, the subject has hypertriglyceridemia, non-familial hypertriglyceridemia, familial hypertriglyceridemia, heterozygous familial hypertriglyceridemia, homozygous familial hypertriglyceridemia, mixed dyslipidemia, atherosclerosis, a risk of developing atherosclerosis, coronary heart disease, a history of coronary heart disease, early onset coronary heart disease, one or more risk factors for coronary heart disease, type II diabetes, type II diabetes with dyslipidemia, dyslipidemia, hyperlipidemia, hypercholesterolemia, hyperfattyacidemia, hepatic steatosis, non-alcoholic steatohepatitis, pancreatitis and/or non-alcoholic fatty liver disease.

[0748] In certain embodiments, the invention provides methods for using a conjugated antisense compound targeted to an ApoCIII nucleic acid in the preparation of a medicament.

[0749] 5. C-Reactive Protein (CRP)

[0750] CRP (also known as PTX1) is an essential human acute-phase reactant produced in the liver in response to a variety of inflammatory cytokines. The protein, first identified in 1930, is highly conserved and considered to be an early indicator of infectious or inflammatory conditions. Plasma CRP levels increase 1,000-fold in response to infection, ischemia, trauma, burns, and inflammatory conditions. In clinical trials where patients receive lipid-lowering therapy, such as statin therapy, it has been demonstrated that patients having reductions in both LDL-C and CRP have a reduced risk of future coronary events relative to patients experiencing only reductions in LDL-C. Antisense compounds targeting CRP have been previously disclosed in WO2003/010284 and WO2005/005599, each herein incorporated by reference in its entirety. An antisense oligonucleotide targeting CRP, ISIS-CRP_{Rx}, is currently in Phase 2 clinical trials to study its effectiveness in treating subjects with rheumatoid arthritis and paroxysmal atrial fibrillation. However, there is still a need to provide patients with additional and more potent treatment options.

### Certain Conjugated Antisense Compounds Targeted to a CRP Nucleic Acid

[0751] In certain embodiments, conjugated antisense compounds are targeted to a CRP nucleic acid having the sequence of GENBANK® Accession No. M11725.1, incorporated herein as SEQ ID NO: 6. In certain such embodiments, a conjugated antisense compound is at least 90%, at least 95%, or 100% complementary to SEQ ID NO: 6.

[0752] In certain embodiments, a conjugated antisense compound targeted to SEQ ID NO: 6 comprises an at least 8 consecutive nucleobase sequence of SEQ ID NO: 33. In certain embodiments, a conjugated antisense compound targeted to SEQ ID NO: 6 comprises a nucleobase sequence of SEQ ID NO: 33. In certain embodiments, such conjugated antisense compounds comprise a conjugate comprising 1-3 GalNAc ligands. In certain embodiments, such antisense compounds comprise a conjugate disclosed herein.

TABLE 6
Antisense Compounds targeted to CRP SEQ ID NO: 6

| | Target | | | SEQ ID |
|---|---|---|---|---|
| ISIS No | Start Site | Sequence (5′-3′) | Motif | NO |
| 329993 | 1378 | AGCATAGTTAACGAGCTCCC | eeeeeddddddddddeeeee | 33 |

### CRP Therapeutic Indications

[0753] In certain embodiments, the invention provides methods for using a conjugated antisense compound targeted to a CRP nucleic acid for modulating the expression of CRP in a subject. In certain embodiments, the expression of CRP is reduced.

[0754] In certain embodiments, the invention provides methods for using a conjugated antisense compound targeted to a CRP nucleic acid in a pharmaceutical composition for treating a subject. In certain embodiments, the subject has a cardiovascular and/or metabolic disease, disorder or condition. In certain embodiments, the subject has hypercholesterolemia, non-familial hypercholesterolemia, familial hypercholesterolemia, heterozygous familial hypercholesterolemia, homozygous familial hypercholesterolemia, mixed dyslipidemia, atherosclerosis, a risk of developing atherosclerosis, coronary heart disease, a history of coronary heart disease, early onset coronary heart disease, one or more risk factors for coronary heart disease. In certain embodiments, the individual has paroxysmal atrial fibrillation, acute coronary syndrome, vascular injury, arterial occlusion, unstable angina, post peripheral vascular disease, post myocardial infarction (MI), thrombosis, deep vein thrombus, end-stage renal disease (ESRD), chronic renal failure, complement activation, congestive heart failure, or systemic vasculitis. In certain embodiments, the individual has had a stroke. In certain embodiments, the individual has undergone a procedure selected from elective stent placement, angioplasty, post percutaneous transluminal angioplasty (PTCA), cardiac transplantation, renal dialysis or cardiopulmonary bypass. In certain embodiments, the individual has an inflammatory disease. In certain such embodiments, the inflammatory disease is selected from inflammatory bowel disease, ulcerative colitis, rheumatoid arthritis, or osteoarthritis.

[0755] In certain embodiments, the invention provides methods for using a conjugated antisense compound targeted to a CRP nucleic acid in the preparation of a medicament.

[0756] 6. eIF4E

[0757] Overexpression of eIF4E has been reported in many human cancers and cancer-derived cell lines and also leads to oncogenic transformation of cells and invasive/metastatic phenotype in animal models. Unlike non-transformed, cultured cells, transformed cell lines express eIF4E independently of the presence of serum growth factors (Rosenwald, Cancer Lett., 1995, 98, 77-82). Excess eIF4E leads to aberrant growth and neoplastic morphology in HeLa cells and also causes tumorigenic transformation in NIH 3T3 and Rat2 fibroblasts, as judged by anchorage-independent growth, formation of transformed foci in culture and tumor formation in nude mice (De Benedetti et al., Proc. Natl. Acad. Sci. USA, 1990, 87, 8212-8216; and Lazaris-Karatzas et al., Nature, 1990, 345, 544-547).

[0758] eIF4E is found elevated in several human cancers, including but not limited to non-Hodgkin's lymphomas, colon adenomas and carcinomas and larynx, head and neck, prostate, breast and bladder cancers (Crew et al., Br. J. Cancer, 2000, 82, 161-166; Graff et al., Clin. Exp. Metastasis, 2003, 20, 265-273; Haydon et al., Cancer, 2000, 88, 2803-2810; Kerekatte et al., Int. J. Cancer, 1995, 64, 27-31; Rosenwald et al., Oncogene, 1999, 18, 2507-2517; Wang et al., Am. J. Pathol., 1999, 155, 247-255). Upregulation of eIF4E is an early event in colon carcinogenesis, and is frequently accompanied by an increase in cyclin D1 levels (Rosenwald et al., Oncogene, 1999, 18, 2507-2517). Antisense compounds targeting eIF4E have been previously disclosed in WO2005/028628, herein incorporated by reference in its entirety. An antisense oligonucleotide targeting eIF4E, ISIS-eIF4E_{Rx}, is currently in Phase 1/2 clinical trials to study its effectiveness in treating subjects with cancer.

Certain Conjugated Antisense Compounds Targeted to an eIF4E Nucleic Acid

[0759] In certain embodiments, conjugated antisense compounds are targeted to an eIF4E nucleic acid having the sequence of GENBANK® Accession No. M15353.1, incorporated herein as SEQ ID NO: 7. In certain such embodiments, a conjugated antisense compound is at least 90%, at least 95%, or 100% complementary to SEQ ID NO: 7.

[0760] In certain embodiments, a conjugated antisense compound targeted to SEQ ID NO: 7 comprises an at least 8 consecutive nucleobase sequence of SEQ ID NO: 34. In certain embodiments, a conjugated antisense compound targeted to SEQ ID NO: 7 comprises a nucleobase sequence of SEQ ID NO: 34. In certain embodiments, such conjugated antisense compounds comprise a conjugate comprising 1-3 GalNAc ligands. In certain embodiments, such antisense compounds comprise a conjugate disclosed herein.

TABLE 7
Antisense Compounds targeted to eIF4E SEQ ID NO: 7

| | Target | | | SEQ ID |
|---|---|---|---|---|
| ISIS No | Start Site | Sequence (5′-3′) | Motif | NO |
| 183750 | 1285 | TGTCATATTCCTGGATCCTT | eeeeeddddddddddeeeee | 34 |

eIF4E Therapeutic Indications

[0761] In certain embodiments, the invention provides methods for using a conjugated antisense compound targeted to an eIF4E nucleic acid for modulating the expression of eIF4E in a subject. In certain embodiments, the expression of eIF4E is reduced.

[0762] In certain embodiments, the invention provides methods for using a conjugated antisense compound targeted to an eIF4E nucleic acid in a pharmaceutical composition for treating a subject. In certain embodiments, the subject has cancer. In certain aspects, the cancer is prostate cancer.

[0763] In certain embodiments, the invention provides methods for using a conjugated antisense compound targeted to an eIF4E nucleic acid in the preparation of a medicament.

[0764] 7. Factor VII

[0765] Coagulation Factor VII (also known as serum prothrombin conversion accelerator) is a key component of the tissue factor coagulation pathway. Clinicians have linked elevated levels of Factor VII activity with poor prognosis in several thrombotic diseases, such as heart attacks, and with cancer-associated thrombosis, which is the second leading cause of death in cancer patients. In preclinical studies, antisense inhibition of Factor VII rapidly reduced Factor VII activity by more than 90 percent in three days with no observed increase in bleeding, which is a common side effect of currently available anti-thrombotic drugs. Antisense compounds targeting Factor VII have been previously disclosed in WO2009/061851, WO2012/174154, and PCT Application no. PCT/US2013/025381, each herein incorporated by reference in its entirety. Clinical studies are planned to assess ISIS-FVII_{Rx} in acute clinical settings, such as following surgery, to prevent patients from developing harmful blood clots. However, there is still a need to provide patients with additional and more potent treatment options.

### Certain Conjugated Antisense Compounds Targeted to a Factor VII Nucleic Acid

[0766] In certain embodiments, conjugated antisense compounds are targeted to a Factor VII nucleic acid having the sequence of GENBANK® Accession No. NT_027140.6 truncated from nucleobases 1255000 to 1273000), incorporated herein as SEQ ID NO: 8. In certain such embodiments, a conjugated antisense compound targeted to SEQ ID NO: 8 is at least 90%, at least 95% or 100% complementary to SEQ ID NO: 8.

[0767] In certain embodiments, a conjugated antisense compound targeted to SEQ ID NO: 8 comprises an at least 8 consecutive nucleobase sequence of SEQ ID NOs: 35-43. In certain embodiments, a conjugated antisense compound targeted to SEQ ID NO: 8 comprises a nucleobase sequence of SEQ ID NOs: 35-43. In certain embodiments, such conjugated antisense compounds comprise a conjugate comprising 1-3 GalNAc ligands. In certain embodiments, such antisense compounds comprise a conjugate disclosed herein.

TABLE 8
Antisense Compounds targeted to Factor VII SEQ ID NO: 8

| | Target | | | SEQ ID |
|---|---|---|---|---|
| ISIS No | Start Site | Sequence (5′-3′) | Motif | NO |
| 540175 | 2592 | GGACACCCACGCCCCC | eekddddddddddkke | 35 |
| | 2626 | | | |
| | 2660 | | | |
| | 2796 | | | |
| | 2966 | | | |
| | 3000 | | | |
| | 3034 | | | |
| | 3068 | | | |
| | 3153 | | | |
| | 3170 | | | |
| | 3272 | | | |
| | 3374 | | | |
| | 3578 | | | |
| | 3851 | | | |
| | 3953 | | | |
| | 4124 | | | |
| | 4260 | | | |
| | 4311 | | | |
| | 4447 | | | |
| | 4532 | | | |
| 490279 | 1387 | CCCTCCTGTGCCTGGATGCT | eeeeeddddddddddeeeee | 36 |
| 473589 | 15128 | GCTAAACAACCGCCTT | kdkdkdddddddddee | 37 |
| 407935 | 15191 | ATGCATGGTGATGCTTCTGA | eeeeeddddddddddeeeee | 38 |
| 529804 | 15192 | CATGGTGATGCTTCTG | kddddddddddkekee | 39 |
| 534796 | 15131 | AGAGCTAAACAACCGC | Ekkddddddddddkke | 40 |
| 540162 | 2565 | ACTCCCGGGACACCCA | eekddddddddddkke | 41 |
| | 2633 | | | |
| | 2667 | | | |
| | 2735 | | | |
| | 2803 | | | |
| | 2837 | | | |
| | 2905 | | | |
| | 3007 | | | |
| | 3041 | | | |
| | 3075 | | | |
| | 3092 | | | |
| | 3279 | | | |
| | 3381 | | | |
| | 3483 | | | |
| | 3603 | | | |
| | 3722 | | | |
| | 3756 | | | |
| | 3858 | | | |
| | 3892 | | | |
| | 3960 | | | |
| | 4046 | | | |
| | 4131 | | | |
| | 4165 | | | |
| | 4318 | | | |
| | 4454 | | | |
| 540182 | 2692 | ACACCCTCGCCTCCGG | eekddddddddddkke | 42 |
| | 2760 | | | |
| | 2862 | | | |
| | 2930 | | | |
| | 3117 | | | |
| | 3338 | | | |
| | 3440 | | | |
| | 3508 | | | |
| | 3542 | | | |
| | 3628 | | | |
| | 3662 | | | |
| | 3781 | | | |
| | 3815 | | | |
| | 3917 | | | |
| | 4190 | | | |
| | 4224 | | | |
| | 4377 | | | |
| | 4411 | | | |
| 540191 | 3109 | GCCTCCGGAACACCCA | eekddddddddddkke | 43 |
| | 3194 | | | |
| | 3330 | | | |
| | 3432 | | | |
| | 3500 | | | |
| | 3534 | | | |
| | 3620 | | | |
| | 3654 | | | |
| | 3773 | | | |
| | 4182 | | | |
| | 4216 | | | |
| | 4369 | | | |
| | 4403 | | | |

### Factor VII Therapeutic Indications

[0768] In certain embodiments, the invention provides methods for using a conjugated antisense compound targeted to a Factor VII nucleic acid for modulating the expression of Factor VII in a subject. In certain embodiments, the expression of Factor VII is reduced.

[0769] In certain embodiments, the invention provides methods for using a conjugated antisense compound targeted to a Factor VII nucleic acid in a pharmaceutical composition for treating a subject. In certain embodiments, the subject has or is at risk of developing a thromboembolic condition, such as, heart attack, stroke, deep vein thrombosis, or pulmonary embolism. In certain embodiments, the subject is at risk of developing a thromboembolic condition and/or otherwise in need of anticoagulant therapy. Examples of such subjects include those undergoing major orthopedic surgery and patients in need of chronic anticoagulant treatment. In certain embodiments, the subject has or is at risk of developing an inflammatory disease, disorder or condition. In certain embodiments, the subject has or is at risk of developing allergic diseases (e.g., allergic rhinitis, chronic rhinosinusitis), autoimmune diseases (e.g, multiple sclerosis, arthritis, scleroderma, psoriasis, celiac disease), cardiovascular diseases, colitis, diabetes (e.g., type 1 insulin-dependent diabetes mellitus), hypersensitivities (e.g., Type1, 2, 3 or 4 hypersensitivity), infectious diseases (e.g., viral infection, mycobacterial infection, helminth infection), posterior uveitis, airway hyperresponsiveness, asthma, atopic dermatitis, colitis, endometriosis, thyroid disease (e.g., Graves' disease) and pancreatitis.

[0770] In certain embodiments, the invention provides methods for using a conjugated antisense compound targeted to a Factor VII nucleic acid in the preparation of a medicament.

[0771] 8. Factor XI

[0772] Coagulation factor XI (also known as plasma thromboplastin antecedent) is an important member of the coagulation pathway. High levels of Factor XI increase the risk of thrombosis, a process involving aberrant blood clot formation responsible for most heart attacks and strokes. Elevated levels of Factor XI also increase the risk of venous thrombosis, a common problem after surgery, particularly major orthopedic procedures, such as knee or hip replacement. People who are deficient in Factor XI have a lower incidence of thromboembolic events with minimal increase in bleeding risk. Antisense compounds targeting Factor XI have been previously disclosed in WO2010/045509 and WO2010/121074, each herein incorporated by reference in its entirety. Currently, an antisense oligonucleotide targeting Factor XI, ISIS-FXI_{Rx}, is in Phase 2 clinical studies to assess the effectiveness of ISIS-FXI_{Rx} in reducing the number of thrombotic events in patients following total knee arthroplasty without increasing bleeding. However, there is still a need to provide patients with additional and more potent treatment options.

### Certain Conjugated Antisense Compounds Targeted to a Factor XI Nucleic Acid

[0773] In certain embodiments, conjugated antisense compounds are targeted to a Factor XI nucleic acid having the sequence of GENBANK® Accession No. NM_000128.3, incorporated herein as SEQ ID NO: 9. In certain such embodiments, a conjugated antisense compound is at least 90%, at least 95%, or 100% complementary to SEQ ID NO: 9.

[0774] In certain embodiments, a conjugated antisense compound targeted to SEQ ID NO: 9 comprises an at least 8 consecutive nucleobase sequence of SEQ ID NOs: 44-48. In certain embodiments, a conjugated antisense compound targeted to SEQ ID NO: 9 comprises a nucleobase sequence of SEQ ID NOs: 44-48. In certain embodiments, such conjugated antisense compounds comprise a conjugate comprising 1-3 GalNAc ligands. In certain embodiments, such antisense compounds comprise a conjugate disclosed herein.

TABLE 9
Antisense Compounds targeted to Factor XI SEQ ID NO: 9

| | Target | | | SEQ ID |
|---|---|---|---|---|
| ISIS No | Start Site | Sequence (5′-3′) | Motif | NO |
| 416858 | 1288 | ACGGCATTGGTGCACAGTTT | eeeeeddddddddddeeeee | 44 |
| 416838 | 1022 | GCAACCGGGATGATGAGTGC | eeeeeddddddddddeeeee | 45 |
| 416850 | 1278 | TGCACAGTTTCTGGCAGGCC | eeeeeddddddddddeeeee | 46 |
| 416864 | 1296 | GGCAGCGGACGGCATTGGTG | eeeeeddddddddddeeeee | 47 |
| 417002 | 1280 | GGTGCACAGTTTCTGGCAGG | eedddddddddddddeeeee | 48 |

### Factor XI Therapeutic Indications

[0775] In certain embodiments, the invention provides methods for using a conjugated antisense compound targeted to a Factor XI nucleic acid for modulating the expression of Factor XI in a subject. In certain embodiments, the expression of Factor XI is reduced.

[0776] In certain embodiments, the invention provides methods for using a conjugated antisense compound targeted to a Factor XI nucleic acid in a pharmaceutical composition for treating a subject. In certain embodiments, the subject has or is at risk of developing a thromboembolic condition, such as, heart attack, stroke, deep vein thrombosis, or pulmonary embolism. In certain embodiments, the subject is at risk of developing a thromboembolic condition and/or otherwise in need of anticoagulant therapy. Examples of such subjects include those undergoing major orthopedic surgery and patients in need of chronic anticoagulant treatment. In certain embodiments, the subject has or is at risk of developing an inflammatory disease, disorder or condition. In certain embodiments, the subject has or is at risk of developing allergic diseases (e.g., allergic rhinitis, chronic rhinosinusitis), autoimmune diseases (e.g, multiple sclerosis, arthritis, scleroderma, psoriasis, celiac disease), cardiovascular diseases, colitis, diabetes (e.g., type 1 insulin-dependent diabetes mellitus), hypersensitivities (e.g., Type1, 2, 3 or 4 hypersensitivity), infectious diseases (e.g., viral infection, mycobacterial infection, helminth infection), posterior uveitis, airway hyperresponsiveness, asthma, atopic dermatitis, colitis, endometriosis, thyroid disease (e.g., Graves' disease) and pancreatitis.

[0777] In certain embodiments, the invention provides methods for using a conjugated antisense compound targeted to a Factor XI nucleic acid in the preparation of a medicament.

[0778] 9. Glucocorticoid Receptor (GCCR)

[0779] Complementary DNA clones encoding the human glucocorticoid receptor (also known as nuclear receptor subfamily 3, group C, member 1; NR3C1; GCCR; GCR; GRL; Glucocorticoid receptor, lymphocyte) were first isolated in 1985 (Hollenberg et al., Nature, 1985, 318, 635-641; Weinberger et al., Science, 1985, 228, 740-742). The gene is located on human chromosome 5q11-q13 and consists of 9 exons (Encio and Detera-Wadleigh, J Biol Chem, 1991, 266, 7182-7188; Gehring et al., Proc Natl Acad Sci USA, 1985, 82, 3751-3755).

[0780] The human glucocorticoid receptor is comprised of three major domains, the N-terminal activation domain, the central DNA-binding domain and the C-terminal ligand-binding domain (Giguere et al., Cell, 1986, 46, 645-652). In the absence of ligand, the glucocorticoid receptor forms a large heteromeric complex with several other proteins, from which it dissociates upon ligand binding.

[0781] In the liver, glucocorticoid agonists increase hepatic glucose production by activating the glucocorticoid receptor, which subsequently leads to increased expression of the gluconeogenic enzymes phosphoenolpyruvate carboxykinase (PEPCK) and glucose-6-phosphatase. Through gluconeogenesis, glucose is formed through non-hexose precursors, such as lactate, pyruvate and alanine (Link, Curr Opin Investig Drugs, 2003, 4, 421-429).

[0782] Antisense compounds targeting GCCR have been previously disclosed in WO2007/035759, WO2005/071080, and PCT application no. PCT/US2012/061984, each herein incorporated by reference in its entirety. An antisense oligonucleotide targeting GCCR, ISIS-GCCR_{Rx}, recently completed a Phase I clinical study with positive results. However, there is still a need to provide patients with additional and more potent treatment options.

### Certain Conjugated Antisense Compounds Targeted to a GCCR Nucleic Acid

[0783] In certain embodiments, conjugated antisense compounds are targeted to a GCCR nucleic acid having the sequence of the complement of GENBANK Accession No. NT_029289.10 truncated from nucleobases 3818000 to 3980000, incorporated herein as SEQ ID NO: 10. In certain such embodiments, a conjugated antisense compound targeted to SEQ ID NO: 10 is at least 90%, at least 95%, or 100% complementary to SEQ ID NO: 10.

[0784] In certain embodiments, a conjugated antisense compound targeted to SEQ ID NO: 10 comprises an at least 8 consecutive nucleobase sequence of SEQ ID NOs: 49-59. In certain embodiments, a conjugated antisense compound targeted to SEQ ID NO: 10 comprises a nucleobase sequence of SEQ ID NOs: 49-59. In certain embodiments, such conjugated antisense compounds comprise a conjugate comprising 1-3 GalNAc ligands. In certain embodiments, such antisense compounds comprise a conjugate disclosed herein.

TABLE 10
Antisense Compounds targeted to GCCR SEQ ID NO: 10

| | Target | | | |
|---|---|---|---|---|
| | Start | | | SEQ ID |
| ISIS No | Site | Sequence (5′-3′) | Motif | NO |
| 426115 | 65940 | GCAGCCATGGTGATCAGGAG | eeeeeddddddddddeeeee | 49 |
| 420470 | 57825 | GGTAGAAATATAGTTGTTCC | eeeeeddddddddddeeeee | 50 |
| 420476 | 59956 | TTCATGTGTCTGCATCATGT | eeeeeddddddddddeeeee | 51 |
| 426130 | 63677 | GCATCCAGCGAGCACCAAAG | eeeeeddddddddddeeeee | 52 |
| 426183 | 65938 | AGCCATGGTGATCAGGAGGC | eeeddddddddddddddeee | 53 |
| 426261 | 65938 | AGCCATGGTGATCAGGAGGC | eedddddddddddddeeeee | 53 |
| 426262 | 65939 | CAGCCATGGTGATCAGGAGG | eedddddddddddddeeeee | 54 |
| 426168 | 76224 | GTCTGGATTACAGCATAAAC | eeeeeddddddddddeeeee | 55 |
| 426246 | 76225 | GGTCTGGATTACAGCATAAA | eeeddddddddddddddeee | 56 |
| 426172 | 76229 | CCTTGGTCTGGATTACAGCA | eeeeeddddddddddeeeee | 57 |
| 426325 | 76229 | CCTTGGTCTGGATTACAGCA | eedddddddddddddeeeee | 58 |
| 426267 | 95513 | GTGCTTGTCCAGGATGATGC | eedddddddddddddeeeee | 59 |

### GCCR Therapeutic Indications

[0785] In certain embodiments, the invention provides methods for using a conjugated antisense compound targeted to a GCCR nucleic acid for modulating the expression of GCCR in a subject. In certain embodiments, the expression of GCCR is reduced.

[0786] In certain embodiments, the invention provides methods for using a conjugated antisense compound targeted to a GCCR nucleic acid in a pharmaceutical composition for treating a subject. In certain embodiments, the subject has metabolic related diseases, including metabolic syndrome, diabetes mellitus, insulin resistance, diabetic dyslipidemia, hypertriglyceridemia, obesity and weight gain.

[0787] Diabetes mellitus is characterized by numerous physical and physiological symptoms. Any symptom known to one of skill in the art to be associated with Type 2 diabetes can be ameliorated or otherwise modulated as set forth above in the methods described above. In certain embodiments, the symptom is a physical symptom selected from the group consisting of increased glucose levels, increased weight gain, frequent urination, unusual thirst, extreme hunger, extreme fatigue, blurred vision, frequent infections, tingling or numbness at the extremities, dry and itchy skin, weight loss, slow-healing sores, and swollen gums. In certain embodiments, the symptom is a physiological symptom selected from the group consisting of increased insulin resistance, increased glucose levels, increased fat mass, decreased metabolic rate, decreased glucose clearance, decreased glucose tolerance, decreased insulin sensitivity, decreased hepatic insulin sensitivity, increased adipose tissue size and weight, increased body fat, and increased body weight.

[0788] In certain embodiments, the invention provides methods for using a conjugated antisense compound targeted to a GCCR nucleic acid in the preparation of a medicament.

[0789] 10. Glucagon Receptor (GCGR)

[0790] Diabetes is a chronic metabolic disorder characterized by impaired insulin secretion and/or action. In type 2 diabetes (T2DM), insulin resistance leads to an inability of insulin to control the activity of gluconeogenic enzymes, and many subjects also exhibit inappropriate levels of circulating glucagon in the fasting and postprandial state. Glucagon is secreted from the α-cells of the pancreatic islets and regulates glucose homeostasis through modulation of hepatic glucose production (Quesada et al., J. Endocrinol. 2008. 199: 5-19). Glucagon exerts its action on target tissues via the activation of its receptor, GCGR. The glucagon receptor is a 62 kDa protein that is a member of the class B G-protein coupled family of receptors (Brubaker et al., Recept. Channels. 2002. 8: 179-88). GCGR activation leads to signal transduction by G proteins (Gₛα and G_{q}), whereby Gₛα activates adenylate cyclase, which causes cAMP production, resulting in an increase in levels of protein kinase A. GCGR signaling in the liver results in increased hepatic glucose production by induction of glycogenolysis and gluconeogenesis along with inhibition of glycogenesis (Jiang and Zhang. Am. J. Physiol. Endocrinol. Metab. 2003. 284: E671-E678). GCGR is also expressed in extrahepatic tissues, which includes heart, intestinal smooth muscle, kidney, brain, and adipose tissue (Hansen et al., Peptides. 1995. 16: 1163-1166).

[0791] Antisense compounds targeting GCGR have been previously disclosed in WO2004/096996, WO2004/096016, WO2007/035771, and WO2013/043817, each herein incorporated by reference in its entirety. An antisense oligonucleotide targeting GCGR, ISIS-GCGR_{Rx}, recently completed a Phase I clinical study with positive results. However, there is still a need to provide patients with additional and more potent treatment options.

### Certain Conjugated Antisense Compounds Targeted to a GCGR Nucleic Acid

[0792] In certain embodiments, conjugated antisense compounds are targeted to a GCGR nucleic acid having the sequence of GENBANK® Accession No NW_926918.1 truncated from nucleobases 16865000 to Ser. No. 16/885,000, incorporated herein as SEQ ID NO: 11. In certain such embodiments, a conjugated antisense compound targeted to SEQ ID NO: 11 is at least 90%, at least 95%, or 100% complementary to SEQ ID NO: 11.

[0793] In certain embodiments, a conjugated antisense compound targeted to SEQ ID NO: 11 comprises an at least 8 consecutive nucleobase sequence of SEQ ID NOs: 60-67. In certain embodiments, a conjugated antisense compound targeted to SEQ ID NO: 11 comprises a nucleobase sequence of SEQ ID NOs: 60-67. In certain embodiments, such conjugated antisense compounds comprise a conjugate comprising 1-3 GalNAc ligands. In certain embodiments, such antisense compounds comprise a conjugate disclosed herein.

TABLE 11
Antisense Compounds targeted to GCGR SEQ ID NO: 11

| | | | | SEQ |
|---|---|---|---|---|
| | Target | | | ID |
| ISIS No | Start Site | Sequence (5′-3′) | Motif | NO |
| 449884 | 7270 | GGTTCCCGAGGTGCCCA | eeeddddddddddeeee | 60 |
| | 7295 | | | |
| | 7319 | | | |
| | 7344 | | | |
| | 7368 | | | |
| | 7392 | | | |
| | 7416 | | | |
| | 7440 | | | |
| 398471 | 8133 | TCCACAGGCCACAGGTGGGC | eeeeeddddddddddeeeee | 61 |
| 436140 | 15743 | CTCTTTATTGTTGGAGGACA | eeeeeddddddddddeeeee | 62 |
| 448766 | 9804 | GCAAGGCTCGGTTGGGCTTC | eeeeeddddddddddeeeee | 63 |
| 459014 | 10718 | GGGCAATGCAGTCCTGG | eeeddddddddddeeee | 64 |
| 459032 | 7783 | GAAGGTGACACCAGCCT | eeeddddddddddeeee | 65 |
| 459040 | 8144 | GCTCAGCATCCACAGGC | eeeddddddddddeeee | 66 |
| 459157 | 7267 | GGGTTCCCGAGGTGCCCAATG | eeeeeddddddddddeeeeee | 67 |
| | 7292 | | | |
| | 7316 | | | |
| | 7341 | | | |
| | 7365 | | | |
| | 7389 | | | |
| | 7437 | | | |

### GCGR Therapeutic Indications

[0794] In certain embodiments, the invention provides methods for using a conjugated antisense compound targeted to a GCGR nucleic acid for modulating the expression of GCGR in a subject. In certain embodiments, the expression of GCGR is reduced.

[0795] In certain embodiments, the invention provides methods for using a conjugated antisense compound targeted to a GCGR nucleic acid in a pharmaceutical composition for treating a subject. In certain embodiments, the subject has metabolic related diseases, including metabolic syndrome, diabetes mellitus, insulin resistance, diabetic dyslipidemia, hypertriglyceridemia, obesity and weight gain.

[0796] Diabetes mellitus is characterized by numerous physical and physiological signs and/or symptoms. Any symptom known to one of skill in the art to be associated with Type 2 diabetes can be ameliorated or otherwise modulated as set forth above in the methods described above. In certain embodiments, the symptom or sign is a physical symptom or sign such as increased glucose levels, increased weight gain, frequent urination, unusual thirst, extreme hunger, extreme fatigue, blurred vision, frequent infections, tingling or numbness at the extremities, dry and itchy skin, weight loss, slow-healing sores, and swollen gums. In certain embodiments, the symptom or sign is a physiological symptom or sign selected from the group consisting of increased insulin resistance, increased glucose levels, increased fat mass, decreased metabolic rate, decreased glucose clearance, decreased glucose tolerance, decreased insulin sensitivity, decreased hepatic insulin sensitivity, increased adipose tissue size and weight, increased body fat, and increased body weight.

[0797] In certain embodiments, the invention provides methods for using a conjugated antisense compound targeted to a GCGR nucleic acid in the preparation of a medicament.

[0798] 11. Hepatitis B (HBV)

[0799] Hepatitis B is a viral disease transmitted parenterally by contaminated material such as blood and blood products, contaminated needles, sexually and vertically from infected or carrier mothers to their offspring. It is estimated by the World Health Organization that more than 2 billion people have been infected worldwide, with about 4 million acute cases per year, 1 million deaths per year, and 350-400 million chronic carriers (World Health Organization: Geographic Prevalence of Hepatitis B Prevalence, 2004. http://www.who.int/vaccines-surveillance/graphics/htmls/hepbprev.htm).

[0800] The virus, HBV, is a double-stranded hepatotropic virus which infects only humans and non-human primates. Viral replication takes place predominantly in the liver and, to a lesser extent, in the kidneys, pancreas, bone marrow and spleen (Hepatitis B virus biology. Microbiol Mol Biol Rev. 64: 2000; 51-68.). Viral and immune markers are detectable in blood and characteristic antigen-antibody patterns evolve over time. The first detectable viral marker is HBsAg, followed by hepatitis B e antigen (HBeAg) and HBV DNA. Titers may be high during the incubation period, but HBV DNA and HBeAg levels begin to fall at the onset of illness and may be undetectable at the time of peak clinical illness (Hepatitis B virus infection-natural history and clinical consequences. N Engl J Med. 350: 2004; 1118-1129). HBeAg is a viral marker detectable in blood and correlates with active viral replication, and therefore high viral load and infectivity (Hepatitis B e antigen—the dangerous end game of hepatitis B. N Engl J Med. 347: 2002; 208-210). The presence of anti-HBsAb and anti-HBcAb (IgG) indicates recovery and immunity in a previously infected individual.

[0801] Currently the recommended therapies for chronic HBV infection by the American Association for the Study of Liver Diseases (AASLD) and the European Association for the Study of the Liver (EASL) include interferon alpha (INFα), pegylated interferon alpha-2a (Peg-IFN2a), entecavir, and tenofovir. The nucleoside and nucleobase therapies, entecavir and tenofovir, are successful at reducing viral load, but the rates of HBeAg seroconversion and HBsAg loss are even lower than those obtained using IFNα therapy. Other similar therapies, including lamivudine (3TC), telbivudine (LdT), and adefovir are also used, but for nucleoside/nucleobase therapies in general, the emergence of resistance limits therapeutic efficacy.

[0802] Thus, there is a need in the art to discover and develop new anti-viral therapies. Additionally, there is a need for new anti-HBV therapies capable of increasing HBeAg and HBsAg seroconversion rates. Recent clinical research has found a correlation between seroconversion and reductions in HBeAg (Fried et al (2008) Hepatology 47:428) and reductions in HBsAg (Moucari et al (2009) Hepatology 49:1151). Reductions in antigen levels may have allowed immunological control of HBV infection because high levels of antigens are thought to induce immunological tolerance. Current nucleoside therapies for HBV are capable of dramatic reductions in serum levels of HBV but have little impact on HBeAg and HBsAg levels.

[0803] Antisense compounds targeting HBV have been previously disclosed in WO2011/047312, WO2012/145674, and WO2012/145697, each herein incorporated by reference in its entirety. Clinical studies are planned to assess the effect of antisense compounds targeting HBV in patients. However, there is still a need to provide patients with additional and more potent treatment options.

### Certain Conjugated Antisense Compounds Targeted to a HBV Nucleic Acid

[0804] In certain embodiments, conjugated antisense compounds are targeted to a HBV nucleic acid having the sequence of GENBANK® Accession No. U95551.1, incorporated herein as SEQ ID NO: 12. In certain such embodiments, a conjugated antisense compound targeted to SEQ ID NO: 12 is at least 90%, at least 95%, or 100% complementary to SEQ ID NO: 12.

[0805] In certain embodiments, a conjugated antisense compound targeted to SEQ ID NO: 12 comprises an at least 8 consecutive nucleobase sequence of SEQ ID NO: 68. In certain embodiments, a conjugated antisense compound targeted to SEQ ID NO: 12 comprises a nucleobase sequence of SEQ ID NO: 68. In certain embodiments, such conjugated antisense compounds comprise a conjugate comprising 1-3 GalNAc ligands. In certain embodiments, such antisense compounds comprise a conjugate disclosed herein.

TABLE 12
Antisense Compounds targeted to HBV SEQ ID NO: 12

| | Target | | | SEQ ID |
|---|---|---|---|---|
| ISIS No | Start Site | Sequence (5′-3′) | Motif | NO |
| 505358 | 1583 | GCAGAGGTGAAGCGAAGTGC | eeeeeddddddddddeeeee | 68 |

### HBV Therapeutic Indications

[0806] In certain embodiments, the invention provides methods for using a conjugated antisense compound targeted to a HBV nucleic acid for modulating the expression of HBV in a subject. In certain embodiments, the expression of HBV is reduced.

[0807] In certain embodiments, the invention provides methods for using a conjugated antisense compound targeted to a HBV nucleic acid in a pharmaceutical composition for treating a subject. In certain embodiments, the subject has a HBV-related condition. In certain embodiments, the HBV-related condition includes, but is not limited to, chronic HBV infection, inflammation, fibrosis, cirrhosis, liver cancer, serum hepatitis, jaundice, liver cancer, liver inflammation, liver fibrosis, liver cirrhosis, liver failure, diffuse hepatocellular inflammatory disease, hemophagocytic syndrome, serum hepatitis, and HBV viremia. In certain embodiments, the HBV-related condition may have which may include any or all of the following: flu-like illness, weakness, aches, headache, fever, loss of appetite, diarrhea, jaundice, nausea and vomiting, pain over the liver area of the body, clay- or grey-colored stool, itching all over, and dark-colored urine, when coupled with a positive test for presence of a hepatitis B virus, a hepatitis B viral antigen, or a positive test for the presence of an antibody specific for a hepatitis B viral antigen. In certain embodiments, the subject is at risk for an HBV-related condition. This includes subjects having one or more risk factors for developing an HBV-related condition, including sexual exposure to an individual infected with Hepatitis B virus, living in the same house as an individual with a lifelong hepatitis B virus infection, exposure to human blood infected with the hepatitis B virus, injection of illicit drugs, being a person who has hemophilia, and visiting an area where hepatitis B is common. In certain embodiments, the subject has been identified as in need of treatment for an HBV-related condition.

[0808] In certain embodiments, the invention provides methods for using a conjugated antisense compound targeted to a HBV nucleic acid in the preparation of a medicament.

[0809] 12. Protein Tyrosine Phosphatase 1B (PTP1B)

[0810] PTP1B is a member of a family of PTPs (Barford, et al., Science 1994. 263: 1397-1404) and is a cytosolic enzyme (Neel and Tonks, Curr. Opin. Cell Biol. 1997. 9: 193-204). PTP1B is expressed ubiquitously including tissues that are key regulators of insulin metabolism such as liver, muscle and fat (Goldstein, Receptor 1993. 3: 1-15), where it is the main PTP enzyme.

[0811] PTP1B is considered to be a negative regulator of insulin signaling. PTP1B interacts with and dephosphorylates the insulin receptor, thus attenuating and potentially terminating the insulin signalling transduction (Goldstein et al., J. Biol. Chem. 2000. 275: 4383-4389). The physiological role of PTP1B in insulin signalling has been demonstrated in knockout mice models. Mice lacking the PTP1B gene were protected against insulin resistance and obesity (Elchebly et al., Science 1999. 283: 1544-1548). PTP1B-deficient mice had low adiposity, increased basal metabolic rate as well as total energy expenditure and were protected from diet-induced obesity. Insulin-stimulated glucose uptake was elevated in skeletal muscle, whereas adipose tissue was unaffected providing evidence that increased insulin sensitivity in PTP1B-deficient mice was tissue-specific (Klaman et al., Mol. Cell. Biol. 2000. 20: 5479-5489). These mice were phenotypically normal and were also resistant to diet-induced obesity, insulin resistance and had significantly lower triglyceride levels on a high-fat diet. Therefore, inhibition of PTP1B in patients suffering from Type II diabetes, metabolic syndrome, diabetic dyslipidemia, or related metabolic diseases would be beneficial.

[0812] Antisense compounds targeting PTP1B have been previously disclosed in WO2001/053528, WO2002/092772, WO2004/071407, WO2006/044531, WO2012/142458, WO2006/044531, and WO2012/142458, each herein incorporated by reference in its entirety. An antisense oligonucleotide targeting PTP1B, ISIS-PTP1B_{Rx}, recently completed a Phase I clinical study with positive results. However, there is still a need to provide patients with additional and more potent treatment options.

### Certain Conjugated Antisense Compounds Targeted to a PTP1B Nucleic Acid

[0813] In certain embodiments, conjugated antisense compounds are targeted to a PTP1B nucleic acid having the sequence of GENBANK® Accession No. NM_002827.2, incorporated herein as SEQ ID NO: 13 or GENBANK Accession NT_011362.9 truncated from nucleobases 14178000 to Ser. No. 14/256,000, incorporated herein as SEQ ID NO: 14. In certain such embodiments, a conjugated antisense compound targeted to SEQ ID NO: 13 is at least 90%, at least 95%, or 100% complementary to SEQ ID NO: 13.

[0814] In certain embodiments, a conjugated antisense compound targeted to SEQ ID NO: 13 comprises an at least 8 consecutive nucleobase sequence of SEQ ID NOs: 69-72. In certain embodiments, a conjugated antisense compound targeted to SEQ ID NO: 13 comprises a nucleobase sequence of SEQ ID NOs: 69-72. In certain embodiments, such conjugated antisense compounds comprise a conjugate comprising 1-3 GalNAc ligands. In certain embodiments, such antisense compounds comprise a conjugate disclosed herein.

TABLE 13
Conjugated Antisense Compounds targeted to PTP1B SEQ ID NO: 13

| | Target | | | |
|---|---|---|---|---|
| | Start Site | | | SEQ ID |
| ISIS No | on mRNA | Sequence (5′-3′) | Chemistry | NO |
| 404173 | 3290 | AATGGTTTATTCCATGGCCA | eeeeeddddddddddeeeee | 69 |
| 409826 | 3287 | GGTTTATTCCATGGCCATTG | eeeeeddddddddddeeeee | 70 |
| 142082 | 3291 | AAATGGTTTATTCCATGGCC | eeeeeddddddddddeeeee | 71 |
| 446431 | 3292 | AATGGTTTATTCCATGGC | eeeeddddddddddeeee | 72 |

### PTP1B Therapeutic Indications

[0815] In certain embodiments, the invention provides methods for using a conjugated antisense compound targeted to a PTP1B nucleic acid for modulating the expression of PTP1B in a subject. In certain embodiments, the expression of PTP1B is reduced.

[0816] In certain embodiments, the invention provides methods for using a conjugated antisense compound targeted to a PTP1B nucleic acid in a pharmaceutical composition for treating a subject. In certain embodiments, the subject has metabolic related diseases, including metabolic syndrome, diabetes mellitus, insulin resistance, diabetic dyslipidemia, hypertriglyceridemia, obesity and weight gain.

[0817] Diabetes mellitus is characterized by numerous physical and physiological symptoms. Any symptom known to one of skill in the art to be associated with Type 2 diabetes can be ameliorated or otherwise modulated as set forth above in the methods described above. In certain embodiments, the symptom is a physical symptom selected from the group consisting of increased glucose levels, increased weight gain, frequent urination, unusual thirst, extreme hunger, extreme fatigue, blurred vision, frequent infections, tingling or numbness at the extremities, dry and itchy skin, weight loss, slow-healing sores, and swollen gums. In certain embodiments, the symptom is a physiological symptom selected from the group consisting of increased insulin resistance, increased fat mass, decreased metabolic rate, decreased glucose clearance, decreased glucose tolerance, decreased insulin sensitivity, decreased hepatic insulin sensitivity, increased adipose tissue size and weight, increased body fat, and increased body weight.

[0818] In certain embodiments, the invention provides methods for using a conjugated antisense compound targeted to a PTP1B nucleic acid in the preparation of a medicament.

[0819] 13. STAT3

[0820] The STAT (signal transducers and activators of transcription) family of proteins comprises DNA-binding proteins that play a dual role in signal transduction and activation of transcription. Presently, there are six distinct members of the STAT family (STAT1, STAT2, STAT3, STAT4, STAT5, and STAT6) and several isoforms (STAT1α, STAT1β, STAT3 α and STAT3β). The activities of the STATs are modulated by various cytokines and mitogenic stimuli. Binding of a cytokine to its receptor results in the activation of Janus protein tyrosine kinases (JAKs) associated with these receptors. This phosphorylates STAT, resulting in translocation to the nucleus and transcriptional activation of STAT responsive genes. Phosphorylation on a specific tyrosine residue on the STATs results in their activation, resulting in the formation of homodimers and/or heterodimers of STAT which bind to specific gene promoter sequences. Events mediated by cytokines through STAT activation include cell proliferation and differentiation and prevention of apoptosis.

[0821] The specificity of STAT activation is due to specific cytokines, i.e., each STAT is responsive to a small number of specific cytokines. Other non-cytokine signaling molecules, such as growth factors, have also been found to activate STATs. Binding of these factors to a cell surface receptor associated with protein tyrosine kinase also results in phosphorylation of STAT.

[0822] STAT3 (also acute phase response factor (APRF)), in particular, has been found to be responsive to interleukin-6 (IL-6) as well as epidermal growth factor (EGF) (Darnell, Jr., J. E., et al., Science, 1994, 264, 1415-1421). In addition, STAT3 has been found to have an important role in signal transduction by interferons (Yang, C.-H., et al., Proc. Natl. Acad. Sci. USA, 1998, 95, 5568-5572). Evidence exists suggesting that STAT3 may be regulated by the MAPK pathway. ERK2 induces serine phosphorylation and also associates with STAT3 (Jain, N., et al., Oncogene, 1998, 17, 3157-3167).

[0823] STAT3 is expressed in most cell types (Zhong, Z., et al., Proc. Natl. Acad. Sci. USA, 1994, 91, 4806-4810). It induces the expression of genes involved in response to tissue injury and inflammation. STAT3 has also been shown to prevent apoptosis through the expression of bcl-2 (Fukada, T., et al., Immunity, 1996, 5, 449-460).

[0824] Recently, STAT3 was detected in the mitochondria of transformed cells, and was shown to facilitate glycolytic and oxidative phosphorylation activities similar to that of cancer cells (Gough, D. J., et al., Science, 2009, 324, 1713-1716). The inhibition of STAT3 in the mitochondria impaired malignant transformation by activated Ras. The data confirms a Ras-mediated transformation function for STAT3 in the mitochondria in addition to its nuclear roles.

[0825] Aberrant expression of or constitutive expression of STAT3 is associated with a number of disease processes.

[0826] Antisense compounds targeting STAT3 have been previously disclosed in WO2012/135736 and WO2005/083124, each herein incorporated by reference in its entirety. An antisense oligonucleotide targeting STAT3, ISIS-STAT3_{Rx}, is currently in Phase 1/2 clinical trials to study its effectiveness in treating subjects with cancer. However, there is still a need to provide patients with additional and more potent treatment options.

### Certain Conjugated Antisense Compounds Targeted to a STAT3 Nucleic Acid

[0827] In certain embodiments, conjugated antisense compounds are targeted to a STAT3 nucleic acid having the sequence of GENBANK® Accession No. NM_139276.2, incorporated herein as SEQ ID NO: 15. In certain such embodiments, a conjugated antisense compound targeted to SEQ ID NO: 15 is at least 90%, at least 95%, or 100% complementary to SEQ ID NO: 15.

[0828] In certain embodiments, a conjugated antisense compound targeted to SEQ ID NO: 15 comprises an at least 8 consecutive nucleobase sequence of SEQ ID NO: 73. In certain embodiments, a conjugated antisense compound targeted to SEQ ID NO: 15 comprises a nucleobase sequence of SEQ ID NO: 73. In certain embodiments, such conjugated antisense compounds comprise a conjugate comprising 1-3 GalNAc ligands. In certain embodiments, such antisense compounds comprise a conjugate disclosed herein.

TABLE 14
Antisense Compounds targeted
to STAT3 SEQ ID NO: 15

| | Target | | | SEQ |
|---|---|---|---|---|
| | Start | | | ID |
| ISIS No | Site | Sequence (5′-3′) | Motif | NO |
| 481464 | 3016 | CTATTTGGATGTCAGC | kkkddddddddddkkk | 73 |

### STAT3 Therapeutic Indications

[0829] In certain embodiments, the invention provides methods for using a conjugated antisense compound targeted to a STAT3 nucleic acid for modulating the expression of STAT3 in a subject. In certain embodiments, the expression of STAT3 is reduced.

[0830] In certain embodiments, the invention provides methods for using a conjugated antisense compound targeted to a STAT3 nucleic acid in a pharmaceutical composition for treating a subject. In certain embodiments, the subject has a hyperproliferative disease, disorder or condition. In certain embodiments such hyperproliferative disease, disorder, and condition include cancer as well as associated malignancies and metastases. In certain embodiments, such cancers include lung cancer, including non small cell lung cancer (NSCLC), pancreatic cancer, colorectal cancer, multiple myeloma, hepatocellular carcinoma (HCC), glioblastoma, ovarian cancer, osteosarcoma, head and neck cancer, breast cancer, epidermoid carcinomas, intestinal adenomas, prostate cancer, and gastric cancer.

[0831] In certain embodiments, the invention provides methods for using a conjugated antisense compound targeted to a STAT3 nucleic acid in the preparation of a medicament.

[0832] 14. Transthyretin (TTR)

[0833] TTR (also known as prealbumin, hyperthytoxinemia, dysprealbuminemic, thyroxine; senile systemic amyloidosis, amyloid polyneuropathy, amyloidosis I, PALB; dystransthyretinemic, HST2651; TBPA; dysprealbuminemic euthyroidal hyperthyroxinemia) is a serum/plasma and cerebrospinal fluid protein responsible for the transport of thyroxine and retinol (Sakaki et al, Mol Biol Med. 1989, 6:161-8). Structurally, TTR is a homotetramer; point mutations and misfolding of the protein leads to deposition of amyloid fibrils and is associated with disorders, such as senile systemic amyloidosis (SSA), familial amyloid polyneuropathy (FAP), and familial amyloid cardiopathy (FAC).

[0834] TTR is synthesized primarily by the liver and the choroid plexus of the brain and, to a lesser degree, by the retina in humans (Palha, Clin Chem Lab Med, 2002, 40, 1292-1300). Transthyretin that is synthesized in the liver is secreted into the blood, whereas transthyretin originating in the choroid plexus is destined for the CSF. In the choroid plexus, transthyretin synthesis represents about 20% of total local protein synthesis and as much as 25% of the total CSF protein (Dickson et al., J Biol Chem, 1986, 261, 3475-3478).

[0835] With the availability of genetic and immunohistochemical diagnostic tests, patients with TTR amyloidosis have been found in many nations worldwide. Recent studies indicate that TTR amyloidosis is not a rare endemic disease as previously thought, and may affect as much as 25% of the elderly population (Tanskanen et al, Ann Med. 2008; 40(3):232-9).

[0836] At the biochemical level, TTR was identified as the major protein component in the amyloid deposits of FAP patients (Costa et al, Proc. Natl. Acad. Sci. USA 1978, 75:4499-4503) and later, a substitution of methionine for valine at position 30 of the protein was found to be the most common molecular defect causing the disease (Saraiva et al, J. Clin. Invest. 1984, 74: 104-119). In FAP, widespread systemic extracellular deposition of TTR aggregates and amyloid fibrils occurs throughout the connective tissue, particularly in the peripheral nervous system (Sousa and Saraiva, Prog. Neurobiol. 2003, 71: 385-400). Following TTR deposition, axonal degeneration occurs, starting in the unmyelinated and myelinated fibers of low diameter, and ultimately leading to neuronal loss at ganglionic sites.

[0837] Antisense compounds targeting TTR have been previously disclosed in US2005/0244869, WO2010/017509, and WO2011/139917, each herein incorporated by reference in its entirety. An antisense oligonucleotide targeting TTR, ISIS-TTR_{Rx}, is currently in Phase 2/3 clinical trials to study its effectiveness in treating subjects with Familial Amyloid Polyneuropathy. However, there is still a need to provide patients with additional and more potent treatment options.

### Certain Conjugated Antisense Compounds Targeted to a TTR Nucleic Acid

[0838] In certain embodiments, conjugated antisense compounds are targeted to a TTR nucleic acid having the sequence of GENBANK® Accession No. NM_000371.3, incorporated herein as SEQ ID NO: 16. In certain such embodiments, a conjugated antisense compound targeted to SEQ ID NO: 16 is at least 90%, at least 95%, or 100% complementary to SEQ ID NO: 16.

[0839] In certain embodiments, a conjugated antisense compound targeted to SEQ ID NO: 16 comprises an at least 8 consecutive nucleobase sequence of SEQ ID NOs: 74-81. In certain embodiments, a conjugated antisense compound targeted to SEQ ID NO: 16 comprises a nucleobase sequence of SEQ ID NO: 74-81. In certain embodiments, such conjugated antisense compounds comprise a conjugate comprising 1-3 GalNAc ligands. In certain embodiments, such antisense compounds comprise a conjugate disclosed herein.

TABLE 15
Antisense Compounds targeted to TTR SEQ ID NO: 16

| | Target | | | SEQ ID |
|---|---|---|---|---|
| ISIS No | Start Site | Sequence (5′-3′) | Motif | NO |
| 420915 | 508 | TCTTGGTTACATGAAATCCC | eeeeeddddddddddeeeee | 74 |
| 304299 | 507 | CTTGGTTACATGAAATCCCA | eeeeeddddddddddeeeee | 75 |
| 420921 | 515 | GGAATACTCTTGGTTACATG | eeeeeddddddddddeeeee | 76 |
| 420922 | 516 | TGGAATACTCTTGGTTACAT | eeeeeddddddddddeeeee | 77 |
| 420950 | 580 | TTTTATTGTCTCTGCCTGGA | eeeeeddddddddddeeeee | 78 |
| 420955 | 585 | GAATGTTTTATTGTCTCTGC | eeeeeddddddddddeeeee | 79 |
| 420957 | 587 | AGGAATGTTTTATTGTCTCT | eeeeeddddddddddeeeee | 80 |
| 420959 | 589 | ACAGGAATGTTTTATTGTCT | eeeeeddddddddddeeeee | 81 |

### TTR Therapeutic Indications

[0840] In certain embodiments, the invention provides methods for using a conjugated antisense compound targeted to a TTR nucleic acid for modulating the expression of TTR in a subject. In certain embodiments, the expression of TTR is reduced.

[0841] In certain embodiments, the invention provides methods for using a conjugated antisense compound targeted to a TTR nucleic acid in a pharmaceutical composition for treating a subject. In certain embodiments, the subject has a transthyretin related disease, disorder or condition, or symptom thereof. In certain embodiments, the transthyretin related disease, disorder or condition is transthyretin amyloidosis. “Transthyretin-related amyloidosis” or “transthyretin amyloidosis” or “Transthyretin amyloid disease”, as used herein, is any pathology or disease associated with dysfunction or dysregulation of transthyretin that result in formation of transthyretin-containing amyloid fibrils. Transthyretin amyloidosis includes, but is not limited to, hereditary TTR amyloidosis, leptomeningeal amyloidosis, familial amyloid polyneuropathy (FAP), familial amyloid cardiomyopathy, familial oculoleptomeningeal amyloidosis, senile cardiac amyloidosis, or senile systemic amyloidosis.

[0842] In certain embodiments, the invention provides methods for using a conjugated antisense compound targeted to a TTR nucleic acid in the preparation of a medicament.

[0843] 15. PCSK9

[0844] PCSK9 (also known as Proprotein convertase subtilisin kexin 9) is a member of the subtilisin serine protease family. The other eight mammalian subtilisin proteases, PCSK1-PCSK8 (also called PC1/3, PC2, furin, PC4, PC5/6, PACE4, PC7, and SIP/SKI-1) are proprotein convertases that process a wide variety of proteins in the secretory pathway and play roles in diverse biological processes (Bergeron, F. (2000) J. Mol. Endocrinol. 24, 1-22, Gensberg, K., (1998) Semin. Cell Dev. Biol. 9, 11-17, Seidah, N. G. (1999) Brain Res. 848, 45-62, Taylor, N. A., (2003) FASEB J. 17, 1215-1227, and Zhou, A., (1999) J. Biol. Chem. 274, 20745-20748). PCSK9 has been proposed to play a role in cholesterol metabolism. PCSK9 mRNA expression is down-regulated by dietary cholesterol feeding in mice (Maxwell, K. N., (2003) J. Lipid Res. 44, 2109-2119), up-regulated by statins in HepG2 cells (Dubuc, G., (2004) Arterioscler. Thromb. Vasc. Biol. 24, 1454-1459), and up-regulated in sterol regulatory element binding protein (SREBP) transgenic mice (Horton, J. D., (2003) Proc. Natl. Acad. Sci. USA 100, 12027-12032), similar to the cholesterol biosynthetic enzymes and the low-density lipoprotein receptor (LDLR). Furthermore, PCSK9 missense mutations have been found to be associated with a form of autosomal dominant hypercholesterolemia (Hchola3) (Abifadel, M., et al. (2003) Nat. Genet. 34, 154-156, Timms, K. M., (2004) Hum. Genet. 114, 349-353, Leren, T. P. (2004) Clin. Genet. 65, 419-422). PCSK9 may also play a role in determining LDL cholesterol levels in the general population, because single-nucleotide polymorphisms (SNPs) have been associated with cholesterol levels in a Japanese population (Shioji, K., (2004) J. Hum. Genet. 49, 109-114).

[0845] Antisense compounds targeting PCSK9 have been previously disclosed in U.S. Pat. Nos. 8,084,437; 8,093,222; 8,664,190; and International applications WO 2008/066776 and WO 2009/148605. However, there is still a need to provide patients with additional and more potent treatment options.

### Certain Conjugated Antisense Compounds Targeted to a PCSK9 Nucleic Acid

[0846] In certain embodiments, conjugated antisense compounds are targeted to a PCSK9 nucleic acid having the sequence of GENBANK® Accession NM_174936.3, incorporated herein as SEQ ID NO: 82. In certain such embodiments, a conjugated antisense compound targeted to SEQ ID NO: 82 is at least 90%, at least 95%, or 100% complementary to SEQ ID NO: 82.

[0847] In certain embodiments, a conjugated antisense compound targeted to SEQ ID NO: 82 comprises an at least 8 consecutive nucleobase sequence of SEQ ID NOs: 83-86. In certain embodiments, a conjugated antisense compound targeted to SEQ ID NO: 82 comprises a nucleobase sequence of SEQ ID NO: 83-86. In certain embodiments, such conjugated antisense compounds comprise a conjugate comprising 1-3 GalNAc ligands. In certain embodiments, such antisense compounds comprise a conjugate disclosed herein.

TABLE 16
Antisense Compounds targeted to PCSK9 SEQ ID NO: 156

| | Target | | | SEQ ID |
|---|---|---|---|---|
| ISIS No | Start Site | Sequence (5′-3′) | Motif | NO |
| 405879 | 1073 | CCTTGGCCACGCCGGCATCC | eeeeeddddddddddeeeee | 83 |
| 431131 | 1015 | GTCACACTTGCTGGCCTGTC | eeeeeddddddddddeeeee | 84 |
| 405995 | 2001 | TGGCAGTGGACACGGGTCCC | eeeeeddddddddddeeeee | 85 |
| 480604 | 3381 | ACTCACCGAGCTTCCTGGTC | eeeeeddddddddddeeeee | 86 |

### PCSK9 Therapeutic Indications

[0848] In certain embodiments, the invention provides methods for using a conjugated antisense compound targeted to a PCSK9 nucleic acid for modulating the expression of PCSK9 in a subject. In certain embodiments, the expression of PCSK9 is reduced.

[0849] In certain embodiments, the invention provides methods for using a conjugated antisense compound targeted to a PCSK9 nucleic acid in a pharmaceutical composition for treating a subject. In certain embodiments, the subject has a PCSK9 related disease, disorder or condition, or symptom thereof. In certain embodiments, the PCSK9 related disease, disorder or condition is a metabolic or cardiovascular disease.

[0850] In certain embodiments, the invention provides methods for using a conjugated antisense compound targeted to a PCSK9 nucleic acid in the preparation of a medicament.

[0851] 16. Complement Factor B

[0852] The complement system is part of the host innate immune system involved in lysing foreign cells, enhancing phagocytosis of antigens, clumping antigen-bearing agents, and attracting macrophages and neutrophils. The complement system is divided into three initiation pathways—the classical, lectin, and alternative pathways—that converge at component C3 to generate an enzyme complex known as C3 convertase, which cleaves C3 into C3a and C3b. C3b associates with C3 convertase mediated by CFB and results in generation of C5 convertase, which cleaves C5 into C5a and C5b, which initiates the membrane attack pathway resulting in the formation of the membrane attack complex (MAC) comprising components C5b, C6, C7, C8, and C9. The membrane-attack complex (MAC) forms transmembrane channels and disrupts the phospholipid bilayer of target cells, leading to cell lysis.

[0853] In the homeostatic state, the alternative pathway is continuously activated at a low “tickover” level as a result of activation of the alternative pathway by spontaneous hydrolysis of C3 and the production of C3b, which generates C5 convertase.

### Oligonucleotide Designed to Target Human Complement Factor B (CFB)

TABLE 17

| Isis | | SEQ ID |
|---|---|---|
| No. | Sequence (5′ to 3′) | No. |
| 588540 | AₑₛTₑₛ^{m}Cₑₛ^{m}Cₑₛ^{m}CₑₛA_{ds}^{m}C_{ds}G_{ds}^{m}C_{ds}^{m}C_{ds}^{m} | 87 |
| | C_{ds}^{m}C_{ds}T_{ds}G_{ds}T_{ds}^{m}Cₑₛ^{m}CₑₛAₑₛGₑₛ^{m}Cₑ | |

[0855] 17. Angiopoietin-Like 3

[0856] Diabetes and obesity (sometimes collectively referred to as “diabesity”) are interrelated in that obesity is known to exacerbate the pathology of diabetes and greater than 60% of diabetics are obese. Most human obesity is associated with insulin resistance and leptin resistance. In fact, it has been suggested that obesity may have an even greater impact on insulin action than diabetes itself (Sindelka et al., Physiol Res., 2002, 51, 85-91). Additionally, several compounds on the market for the treatment of diabetes are known to induce weight gain, a very undesirable side effect to the treatment of this disease.

[0857] Cardiovascular disease is also interrelated to obesity and diabetes. Cardiovascular disease encompasses a wide variety of etiologies and has an equally wide variety of causative agents and interrelated players. Many causative agents contribute to symptoms such as elevated plasma levels of cholesterol, including non-high density lipoprotein cholesterol (non-HDL-C), as well as other lipid-related disorders. Such lipid-related disorders, generally referred to as dyslipidemia, include hyperlipidemia, hypercholesterolemia and hypertriglyceridemia among other indications. Elevated non-HDL cholesterol is associated with atherogenesis and its sequelae, including cardiovascular diseases such as arteriosclerosis, coronary artery disease, myocardial infarction, ischemic stroke, and other forms of heart disease. These rank as the most prevalent types of illnesses in industrialized countries. Indeed, an estimated 12 million people in the United States suffer with coronary artery disease and about 36 million require treatment for elevated cholesterol levels.

[0858] Epidemiological and experimental evidence has shown that high levels of circulating triglyceride (TG) can contribute to cardiovascular disease and a myriad of metabolic disorders (Valdivielso et al., 2009, Atherosclerosis Zhang et al., 2008, Circ Res. 1; 102(2):250-6). TG derived from either exogenous or endogenous sources is incorporated and secreted in chylomicrons from the intestine or in very low density lipoproteins (VLDL) from the liver. Once in circulation, TG is hydrolyzed by lipoprotein lipase (LpL) and the resulting free fatty acids can then be taken up by local tissues and used as an energy source. Due to the profound effect LpL has on plasma TG and metabolism in general, discovering and developing compounds that affect LpL activity are of great interest.

[0859] Metabolic syndrome is a combination of medical disorders that increase one's risk for cardiovascular disease and diabetes. The symptoms, including high blood pressure, high triglycerides, decreased HDL and obesity, tend to appear together in some individuals. It affects a large number of people in a clustered fashion. In some studies, the prevalence in the USA is calculated as being up to 25% of the population. Metabolic syndrome is known under various other names, such as (metabolic) syndrome X, insulin resistance syndrome, Reaven's syndrome or CHAOS. With the high prevalence of cardiovascular disorders and metabolic disorders there remains a need for improved approaches to treat these conditions

[0860] The angiopoietins are a family of secreted growth factors. Together with their respective endothelium-specific receptors, the angiopoietins play important roles in angiogenesis. One family member, angiopoietin-like 3 (also known as angiopoietin-like protein 3, ANGPT5, ANGPTL3, or angiopoietin 5), is predominantly expressed in the liver, and is thought to play a role in regulating lipid metabolism (Kaplan et al., J. Lipid Res., 2003, 44, 136-143). Genome-wide association scans (GWAS) surveying the genome for common variants associated with plasma concentrations of HDL, LDL and triglyceride found an association between triglycerides and single-nucleotide polymorphisms (SNPs) near ANGPTL3 (Willer et al., Nature Genetics, 2008, 40(2):161-169). Individuals with homozygous ANGPTL3 loss-of-function mutations present with low levels of all atherogenic plasma lipids and lipoproteins, such as total cholesterol (TC) and TG, low density lipoprotein cholesterol (LDL-C), apoliprotein B (apoB), non-HDL-C, as well as HDL-C (Romeo et al. 2009, J Clin Invest, 119(1):70-79; Musunuru et al. 2010 N Engl J Med, 363:2220-2227; Martin-Campos et al. 2012, Clin Chim Acta, 413:552-555; Minicocci et al. 2012, J Clin Endocrinol Metab, 97:e1266-1275; Noto et al. 2012, Arterioscler Thromb Vasc Biol, 32:805-809; Pisciotta et al. 2012, Circulation Cardiovasc Genet, 5:42-50). This clinical phenotype has been termed familial combined hypolipidemia (FHBL2). Despite reduced secretion of VLDL, subjects with FHBL2 do not have increased hepatic fat content. They also appear to have lower plasma glucose and insulin levels, and importantly, both diabetes and cardiovascular disease appear to be absent from these subjects. No adverse clinical phenotypes have been reported to date (Minicocci et al. 2013, J of Lipid Research, 54:3481-3490). Reduction of ANGPTL3 has been shown to lead to a decrease in TG, cholesterol and LDL levels in animal models (U.S. Ser. No. 13/520,997; PCT Publication WO 2011/085271). Mice deficient in ANGPTL3 have very low plasma triglyceride (TG) and cholesterol levels, while overexpression produces the opposite effects (Koishi et al. 2002; Koster 2005; Fujimoto 2006). Accordingly, the potential role of ANGPTL3 in lipid metabolism makes it an attractive target for therapeutic intervention.

### Oligonucleotides Designed to Target Human Angiopoietin-Like 3 (ANGPTL3)

TABLE 18

| | | SEQ ID |
|---|---|---|
| ISIS No. | Sequence (5′ to 3′) | No. |
| 563580 | GₑₛGₑₛAₑₛ^{m}CₑₛAₑₛT_{ds}T_{ds}G_{ds}^{m}C_{ds}^{m}C_{ds} | 88 |
| | A_{ds}G_{ds}T_{ds}A_{ds}A_{ds}Tₑₛ^{m}CₑₛGₑₛ^{m}CₑₛAₑ | |

[0862] 18. Plasma Prekallikrein (PKK)

[0863] Plasma prekallikrein (PKK) is the precursor of plasma kallikrein (PK), which is encoded by the KLKB 1 gene. PKK is a glycoprotein that participates in the surface-dependent activation of blood coagulation, fibrinolysis, kinin generation, and inflammation. PKK is converted to PK by Factor XIIa by the cleavage of an internal Arg-Ile peptide bond. PK liberates kinins from kininogens and also generates plasmin from plasminogen. PK is a member of the kinin-kallikrein pathway, which consists of several proteins that play a role in inflammation, blood pressure control, coagulation, and pain.

### Oligonucleotides Designed to Target Human Plasma Prekallikrein (PKK)Oligonucleotides Designed to

TABLE 19

| | | SEQ ID |
|---|---|---|
| Isis No. | Sequence (5′ to 3′) | No. |
| 546254 | TₑₛGₑₛ^{m}CₑₛAₑₛAₑₛG_{ds}T_{ds}^{m}C_{ds}T_{ds}^{m}C_{ds} | 89 |
| | T_{ds}T_{ds}G_{ds}G_{ds}^{m}C_{ds}AₑₛAₑₛAₑₛ^{m}CₑₛAₑ | |

[0865] 19. GHR

[0866] Growth hormone is produced in the pituitary and secreted into the bloodstream where it binds to growth hormone receptor (GHR) on many cell types, causing production of insulin-like growth factor-1 (IGF-1). IGF-1 is produced mainly in the liver, but also in adipose tissue and the kidney, and secreted into the bloodstream. Several disorders, such as acromegaly and gigantism, are associated with elevated growth hormone levels and/or elevated IGF-I levels in plasma and/or tissues.

[0867] Excessive production of growth hormone can lead to diseases such as acromegaly or gigantism. Acromegaly and gigantism are associated with excess growth hormone, often caused by a pituitary tumor, and affects 40-50 per million people worldwide with about 15,000 patients in each of the US and Europe and an annual incidence of about 4-5 per million people. Acromegaly and gigantism are initially characterized by abnormal growth of the hands and feet and bony changes in the facial features. Many of the growth related outcomes are mediated by elevated levels of serum IGF-1.

[0868] Embodiments provided herein relate to methods, compounds, and compositions for treating, preventing, or ameliorating a disease associated with excess growth hormone. Several embodiments provided herein are drawn to antisense compounds or oligonucleotides targeted to growth hormone receptor (GHR). Several embodiments are directed to treatment, prevention, or amelioration of acromegaly with antisense compounds or oligonucleotides targeted to growth hormone receptor (GHR).

TABLE 20
Oligonucleotides designed to target growth hormone receptor (GHR)

| | | SEQ ID |
|---|---|---|
| Isis No. | Sequence (5′ to 3′) | No. |
| 532254 | AₑₛGₑₛ^{m}CₑₛAₑₛTₑₛA_{ds}G_{ds}A_{ds}T_{ds}T_{ds}T_{ds}T_{ds}G_{ds}A_{ds}^{m}C_{ds}TₑₛTₑₛ^{m}Cₑₛ^{m}Cₑₛ^{m}Cₑ | 90 |
| 532401 | ^{m}Cₑₛ^{m}CₑₛAₑₛ^{m}Cₑₛ^{m}CₑₛT_{ds}T_{ds}T_{ds}G_{ds}G_{ds}G_{ds}T_{ds}G_{ds}A_{ds}A_{ds}TₑₛAₑₛGₑₛ^{m}CₑₛAₑ | 91 |
| 523723 | Aₑₛ^{m}CₑₛTₑₛ^{m}CₑₛAₑₛA_{ds}^{m}C_{ds}T_{ds}T_{ds}G_{ds}A_{ds}G_{ds}G_{ds}A_{ds}^{m}C_{ds}AₑₛAₑₛTₑₛAₑₛAₑ | 92 |
| 541767 | AₑₛGₑₛ^{m}CₖₛT_{ds}G_{ds}A_{ds}A_{ds}G_{ds}G_{ds}^{m}C_{ds}A_{ds}A_{ds}^{m}C_{ds}^{m}CₖₛAₖₛGₑ | 93 |
| 541875 | AₑₛGₑₛAₖₛG_{ds}T_{ds}T_{ds}G_{ds}A_{ds}^{m}C_{ds}A_{ds}T_{ds}G_{ds}G_{ds}Gₖₛ^{m}CₖₛAₑ | 94 |
| 542112 | ^{m}Cₑₛ^{m}CₑₛAₖₛG_{ds}T_{ds}A_{ds}G_{ds}T_{ds}^{m}C_{ds}A_{ds}A_{ds}T_{ds}A_{ds}TₖₛTₖₛAₑ | 95 |
| 542118 | ^{m}CₑₛTₑₛ^{m}CₖₛA_{ds}A_{ds}^{m}C_{ds}T_{ds}T_{ds}G_{ds}A_{ds}G_{ds}G_{ds}A_{ds}^{m}CₖₛAₖₛAₑ | 96 |
| 542185 | AₑₛGₑₛTₖₛA_{ds}T_{ds}A_{ds}T_{ds}T_{ds}^{m}C_{ds}A_{ds}G_{ds}T_{ds}^{m}C_{ds}^{m}CₖₛAₖₛAₑ | 97 |

### F. Certain Nucleic Acid GalNAc Conjugates

[0869] In certain embodiments, conjugated antisense compounds comprise antisense compounds having the nucleobase sequence of the antisense compounds in Table 21 below attached to a GalNAc conjugate. In certain embodiments, conjugated antisense compounds comprise antisense compounds having the nucleobase sequence and chemical modifications of the antisense compounds in Table 21 below attached to a GalNAc conjugate. All internucleoside linkages are phosphorothioate internucleoside linkages unless otherwise indicated. A subscript “l” indicates an LNA bicyclic nucleoside. A subscript “d” indicates a 2′-deoxy nucleoside. A subscript “e” indicates a 2′-MOE modified nucleoside. A subscript “v” indicates a 2-amino-2′-deoxyadenosine.

TABLE 21

| | | | | | SEQ |
|---|---|---|---|---|---|
| Sequence | | | | Internucleoside | ID |
| 5′ to 3′ | Target | Motif | Chemistry | Linkages | NO |
| TₗGₗGₗC_{d}A_{d}A_{d}G_{d}C_{d}A_{d}T_{d}C_{d}C_{d}TₗGₗTₗA_{d} | HIF-1α | 3-9-3-1 | LNA/deoxy | phosphorothioate | 98 |
| CₗTₗCₗAₗA_{d}T_{d}C_{d}C_{d}A_{d}T_{d}G_{d}G_{d}CₗAₗGₗC_{d} | Survivin | 4-8-3-1 | LNA/deoxy | phosphorothioate | 99 |
| AₗCₗCₗA_{d}A_{d}G_{d}T_{d}T_{d}T_{d}C_{d}T_{d}T_{d}C_{d}AₗGₗCₗ | Androgen | 3-10-3 | LNA/deoxy | phosphorothioate | 100 |
| | Receptor | | | | |
| GₗCₗA_{d}T_{d}T_{d}G_{d}G_{d}T_{d}A_{d}T_{d}TₗCₗAₗ | ApoB | 2-8-3 | LNA/deoxy | phosphorothioate | 101 |
| TₗTₗCₗAₗGₗC_{d}A_{d}T_{d}T_{d}G_{d}G_{d}T_{d}A_{d}T_{d}T_{d}CₗAₗ | ApoB | 5-10-5 | LNA/deoxy | phosphorothioate | 102 |
| GₗTₗGₗ | | | | | |
| CₗAₗGₗC_{d}A_{d}T_{d}T_{d}G_{d}G_{d}T_{d}A_{d}T_{d}TₗCₗAₗG_{d} | ApoB | 3-10-3 | LNA/deoxy | phosphorothioate | 103 |
| CₗAₗGₗC_{d}A_{d}T_{d}T_{d}G_{d}G_{d}T_{d}A_{d}T_{d}TₗCₗAₗ | ApoB | 3-9-3 | LNA/deoxy | phosphorothioate | 104 |
| AₗGₗCₗA_{d}T_{d}T_{d}G_{d}G_{d}T_{d}A_{d}T_{d}TₗCₗAₗ | ApoB | 3-8-3 | LNA/deoxy | phosphorothioate | 105 |
| GₗCₗA_{d}T_{d}T_{d}G_{d}G_{d}T_{d}A_{d}T_{d}TₗCₗ | ApoB | 2-8-2 | LNA/deoxy | phosphorothioate | 106 |
| TₗGₗCₗT_{d}A_{d}C_{d}A_{d}A_{d}A_{d}A_{d}C_{d}CₗCₗAₗ | PCSK9 | 3-8-3 | LNA/deoxy | phosphorothioate | 107 |
| CₗcC_{d}AₗT_{d}T_{d}GₗTₗC_{d}A_{d}CₗA_{d}CₗT_{d}CₗCₗ | miR-122 | | LNA/deoxy | phosphorothioate | 108 |
| CGGCATGTCTATTTTGTA | TGF-β2 | | | phosphorothioate | 109 |
| GGCTAAATCGCTCCACCAAG | RRM2 | | | phosphorothioate | 110 |
| CTCTAGCGTCTTAAAGCCGA | RRM1 | | | phosphorothioate | 111 |
| GCTGCATGATCTCCTTGGCG | AKT-1 | | | phosphorothioate | 112 |
| ACGTTGAGGGGCATCGTCGC | c-Myc | | | Morpholino | 113 |
| CGGTTAGAAGACTCATCTTT | Influenza | | | Morpholino | 114 |
| | PB1-AUG | | | | |
| CTCCAACATCAAGGAAGATGGCA | dystrophin | | | Morpholino | 115 |
| TTTCTAG | | | | | |
| GAATATTAACANACTGACAAGTC | Marburg | | | Morpholino | 116 |
| | virus NP | | | | |
| CGTTGATANTTCTGCCATNCT | Marburg | | | Morpholino | 117 |
| | virus VP24 | | | | |
| GCCATGGTTTTTTCTCAGG | Ebola virus | | | Morpholino | 118 |
| | VP24 | | | | |
| CCTGCCCTTTGTTCTAGTTG | Ebola virus | | | Morpholino | 119 |
| | VP35 | | | | |
| GGGTCTGCAᵥGCGGGAᵥTGGT | CCR3 & | | | phosphorothioate | 120 |
| | CSF2RB | | | | |
| GTTAᵥCTAᵥCTTCCAᵥCCTGCCTG | CCR3 & | | | phosphorothioate | 121 |
| | CSF2RB | | | | |
| TATCCGGAGGGCTCGCCATGCTG | IRS-1 | | | phosphorothioate | 122 |
| CT | | | | | |
| GTCGCCCCTTCTCCCCGCAGC | Smad7 | | | phosphorothioate | 123 |
| GGACCCTCCTCCGGAGCC | IGF-1R | | | phosphorothioate | 124 |
| ACCAGGCGTCTCGTGGGGCACAT | Ki-67 | | | phosphorothioate | 125 |
| TCTCCCAGCGTGCGCCAT | BCL-2 | | | phosphorothioate | 126 |
| GTGCTCCATTGATGC | c-Raf | | | phosphate | 127 |
| TₑCₑCₑCₑGₑCₑCTGTGACATₑGₑCₑAₑTₑ | c-Raf | 6-8-6 | MOE/deoxy | | 128 |
| Tₑ | | | | | |
| CₑAₑGₑCₑAGCAGAGTCTTCATₑCₑAₑ | Clusterin | 4-13-4 | MOE/deoxy | | 129 |
| Tₑ | | | | | |
| GₑGₑGₑAₑC_{d}G_{d}C_{d}G_{d}G_{d}C_{d}G_{d}C_{d}T_{d}C_{d}G_{d}G_{d} | HSPB1 | 4-12-4 | MOE/deoxy | | 130 |
| TₑCₑAₑTₑ | | | | | |
| CₑCₑAₑCₑAₑA_{d}G_{d}C_{d}T_{d}G_{d}T_{d}C_{d}C_{d}A_{d}G_{d}Tₑ | CTGF | 5-10-5 | MOE/deoxy | | 131 |
| CₑTₑAₑAₑ | | | | | |
| CₑCₑGₑC_{d}A_{d}G_{d}C_{d}C_{d}A_{d}T_{d}G_{d}C_{d}GₑCₑTₑCₑ | CD49d/ | 3-9-8 | MOE/deoxy | | 132 |
| TₑTₑGₑGₑ | VLA-4 | | | | |
| TₑCₑAₑGₑGₑG_{d}C_{d}A_{d}T_{d}T_{d}C_{d}T_{d}T_{d}T_{d}C_{d}Cₑ | GHR | 5-10-5 | MOE/deoxy | | 133 |
| AₑTₑTₑCₑ | | | | | |
| CₑGₑAₑAₑGₑG_{d}A_{d}A_{d}A_{d}C_{d}A_{d}A_{d}T_{d}A_{d}C_{d}Tₑ | IGF-1R | 5-10-5 | MOE/deoxy | | 134 |
| CₑCₑGₑAₑ | | | | | |
| GₑAₑCₑAₑGₑC_{d}A_{d}G_{d}C_{d}C_{d}G_{d}C_{d}A_{d}G_{d}C_{d}Aₑ | hepcidin | 5-10-5 | MOE/deoxy | | 135 |
| GₑAₑAₑAₑ | | | | | |
| TₑGₑGₑAₑAₑA_{d}G_{d}G_{d}C_{d}T_{d}T_{d}A_{d}T_{d}A_{d}C_{d}Cₑ | IL-4Rα1 | 5-10-5 | MOE/deoxy | | 136 |
| CₑCₑTₑCₑ | | | | | |
| TCAAGGAAGATGGCATTTCT | dystrophin | | 2′-O-Methyl | phosphorothioate | 137 |
| GUGGCUAACAGAAGCU | dystrophin | | 2′-O-Methyl | phosphorothioate | 138 |
| UUUGCCGCUGCCCAAUGCCAUC | dystrophin | | 2′-O-Methyl | phosphorothioate | 139 |
| CUG | | | | | |
| GₘCₘGₘUₘG_{d}C_{d}C_{d}T_{d}C_{d}C_{d}T_{d}C_{d}A_{d}C_{d}Uₘ | Protein | 4-10-4 | 2′-O- | phosphorothioate | 140 |
| GₘGₘCₘ | kinase A | | Methyl/deoxy | | |

Additional Sequences and Oligonucleotides Suitable for Conjugation with any Conjugate Herein

[0870] In certain embodiments, a compound comprises an antisense oligonucleotide targeted to eukaryotic Initiation Factor 4E (eIF4E) known in the art and a conjugate group described herein. In certain embodiments, antisense oligonucleotides targeted to dIF4E are RNAi (siRNA or ssRNA) compounds. In certain embodiments, antisense oligonucleotides targeted to dIF4E are RNase H based antisense compounds. Examples of antisense oligonucleotides targeted to eIF4E suitable for conjugation include but are not limited to those disclosed in U.S. Pat. No. 7,425,544, which is incorporated by reference in its entirety herein. In certain embodiments, a compound comprises an antisense oligonucleotide having a nucleobase sequence of any of SEQ ID NOs: 18-122 disclosed in U.S. Pat. No. 7,425,544 and a conjugate group described herein. In certain embodiments, a compound comprises an antisense strand having a nucleobase sequence of any of SEQ ID NOs: 212-459 disclosed in U.S. Pat. No. 7,425,544 and a conjugate group described herein. The nucleobase sequences of all of the aforementioned referenced SEQ ID NOs are incorporated by reference herein.

[0871] In certain embodiments, a compound comprises an antisense oligonucleotide targeted to Signal Transducer and Activator of Transcription 3 (STAT3) known in the art and a conjugate group described herein. In certain embodiments, antisense oligonucleotides targeted to STAT3 are RNAi (siRNA or ssRNA) compounds. In certain embodiments, antisense oligonucleotides targeted to STAT3 are RNase H based antisense compounds. Examples of antisense oligonucleotides targeted to STAT3 suitable for conjugation include but are not limited to those disclosed in WO 2012/135736, WO 2005/083124, and U.S. Pat. No. 6,727,064; which are incorporated by reference in their entireties herein. In certain embodiments, a compound comprises an antisense oligonucleotide having a nucleobase sequence of any of SEQ ID NOs: 9-426, 430-442, 445-464, 471-498, 500-1034, 1036-1512, and 1541-2757 disclosed in WO 2012/135736 and a conjugate group described herein.

[0872] In certain embodiments, a compound comprises an antisense oligonucleotide having a nucleobase sequence of any of SEQ ID NOs: 2-81, 108-150, and 159-381 disclosed in WO 2005/083124 and a conjugate group described herein. In certain embodiments, a compound comprises an antisense oligonucleotide having a nucleobase sequence of any of SEQ ID NOs: 2-81 and 108-150 disclosed in U.S. Pat. No. 6,727,064 and a conjugate group described herein. The nucleobase sequences of all of the aforementioned referenced SEQ ID NOs are incorporated by reference herein.

[0873] In certain embodiments, a compound comprises an antisense oligonucleotide targeted to glucocorticoid receptor (GCCR) known in the art and a conjugate group described herein. In certain embodiments, antisense oligonucleotides targeted to GCCR are RNAi (siRNA or ssRNA) compounds. In certain embodiments, antisense oligonucleotides targeted to GCCR are RNase H based antisense compounds. Examples of antisense oligonucleotides targeted to GCCR suitable for conjugation include but are not limited to those disclosed in WO 2005/071080, WO 2007/035759, and WO 2007/136988; which are incorporated by reference in their entireties herein. In certain embodiments, a compound comprises an antisense oligonucleotide having a nucleobase sequence of any of SEQ ID NOs: 30-216, and 306-310 disclosed in WO 2005/071080 and a conjugate group described herein. In certain embodiments, a compound comprises an antisense oligonucleotide having a nucleobase sequence of any of SEQ ID NOs: 26-113 disclosed in WO 2007/035759 and a conjugate group disclosed herein. In certain embodiments, a compound comprises an antisense oligonucleotide having a nucleobase sequence of any of SEQ ID NOs: 413-485 disclosed in WO 2007/136988 and a conjugate group disclosed herein. The nucleobase sequences of all of the aforementioned referenced SEQ ID NOs are incorporated by reference herein.

[0874] In certain embodiments, a compound comprises an antisense oligonucleotide targeted to glucagon receptor (GCGR) known in the art and a conjugate group described herein. In certain embodiments, antisense oligonucleotides targeted to GCGR are RNAi (siRNA or ssRNA) compounds. In certain embodiments, antisense oligonucleotides targeted to GCGR are RNase H based antisense compounds. Examples of antisense oligonucleotides targeted to GCGR suitable for conjugation include but are not limited to those disclosed in U.S. Pat. No. 7,750,142; U.S. Pat. No. 7,399,853; WO 2007/035771; and WO 2007/134014; which are incorporated by reference in their entireties herein. In certain embodiments, a compound comprises an antisense oligonucleotide having a nucleobase sequence of any of SEQ ID NOs: 20-399 disclosed in U.S. Pat. No. 7,750,142 and a conjugate group described herein. In certain embodiments, a compound comprises an antisense oligonucleotide having a nucleobase sequence of any of SEQ ID NOs: 20-399 disclosed in U.S. Pat. No. 7,399,853 and a conjugate group described herein. In certain embodiments, a compound comprises an antisense oligonucleotide having a nucleobase sequence of SEQ ID NO: 2 disclosed in WO 2007/035771 and a conjugate group described herein. In certain embodiments, a compound comprises an antisense oligonucleotide having a nucleobase sequence of any of SEQ ID NOs: 486-680 disclosed in WO 2007/134014 and a conjugate group described herein. The nucleobase sequences of all of the aforementioned referenced SEQ ID NOs are incorporated by reference herein.

[0875] In certain embodiments, a compound comprises an antisense oligonucleotide targeted to Protein Tyrosine Phosphatase 1B (PTP1B) known in the art and a conjugate group described herein. In certain embodiments, antisense oligonucleotides targeted to PTP1B are RNAi (siRNA or ssRNA) compounds. In certain embodiments, antisense oligonucleotides targeted to PT1B are RNase H based antisense compounds. Examples of antisense oligonucleotides targeted to PTP1B suitable for conjugation include but are not limited to those disclosed in U.S. Pat. No. 7,563,884 and WO 2007/131237, which are incorporated by reference in their entireties herein. In certain embodiments, a compound comprises an antisense oligonucleotide having a nucleobase sequence of any of SEQ ID NOs 17-96 and 244-389 disclosed in U.S. Pat. No. 7,563,884 and a conjugate group described herein. In certain embodiments, a compound comprises an antisense oligonucleotide having a nucleobase sequence of any of SEQ ID NOs 886-1552 disclosed in WO 2007/131237 and a conjugate group described herein. The nucleobase sequences of all of the aforementioned referenced SEQ ID NOs are incorporated by reference herein.

[0876] In certain embodiments, a compound comprises an antisense oligonucleotide targeted to Fibroblast Growth Factor Receptor 4 (FGFR4) known in the art and a conjugate group described herein. In certain embodiments, antisense oligonucleotides targeted to FGFR4 are RNAi (siRNA or ssRNA) compounds. In certain embodiments, antisense oligonucleotides targeted to FGFR4 are RNase H based antisense compounds. Examples of antisense oligonucleotides targeted to FGFR4 suitable for conjugation include but are not limited to those disclosed in WO 2009/046141, which is incorporated by reference in its entirety herein. In certain embodiments, a compound comprises an antisense oligonucleotide having a nucleobase sequence of any of SEQ ID NOs 21-24, 28, 29, 36, 38, 39, 43, 48, 51, 54-56, 58-60, 64-66, and 92-166 disclosed in WO 2009/046141 and a conjugate group described herein. The nucleobase sequences of all of the aforementioned referenced SEQ ID NOs are incorporated by reference herein.

[0877] In certain embodiments, a compound comprises an antisense oligonucleotide targeted to alpha-1-antitrypsin (A1AT) known in the art and a conjugate group described herein. In certain embodiments, antisense oligonucleotides targeted to A1AT are RNAi (siRNA or ssRNA) compounds. In certain embodiments, antisense oligonucleotides targeted to A1AT are RNase H based antisense compounds. Examples of antisense oligonucleotides targeted to A1AT suitable for conjugation include but are not limited to those disclosed in WO 2013/142514, which is incorporated by reference in its entirety herein. In certain embodiments, a compound comprises an antisense oligonucleotide having a nucleobase sequence of any of SEQ ID NOs 20-41 disclosed in WO 2013/142514 and a conjugate group described herein. The nucleobase sequences of all of the aforementioned referenced SEQ ID NOs are incorporated by reference herein.

[0878] In certain embodiments, a compound comprises an antisense oligonucleotide targeted to Factor VII known in the art and a conjugate group described herein. In certain embodiments, antisense oligonucleotides targeted to Factor VII are RNAi (siRNA or ssRNA) compounds. In certain embodiments, antisense oligonucleotides targeted to Factor VII are RNase H based antisense compounds. Examples of antisense oligonucleotides targeted to Factor VII suitable for conjugation include but are not limited to those disclosed in WO 2013/119979 and WO 2009/061851, which are incorporated by reference in their entireties herein. In certain embodiments, a compound comprises an antisense oligonucleotide having a nucleobase sequence of any of SEQ ID NOs 21-659 disclosed in WO 2013/119979 and a conjugate group described herein. In certain embodiments, a compound comprises an antisense oligonucleotide having a nucleobase sequence of any of SEQ ID NOs 4-159 and 168-611 disclosed in WO 2009/061851 and a conjugate group described herein. The nucleobase sequences of all of the aforementioned referenced SEQ ID NOs are incorporated by reference herein.

[0879] In certain embodiments, a compound comprises an antisense oligonucleotide targeted to Factor XI known in the art and a conjugate group described herein. In certain embodiments, antisense oligonucleotides targeted to Factor XI are RNAi (siRNA or ssRNA) compounds. In certain embodiments, antisense oligonucleotides targeted to Factor XI are RNase H based antisense compounds. Examples of antisense oligonucleotides targeted to Factor XI suitable for conjugation include but are not limited to those disclosed in WO 2010/045509 and WO 2010/121074, which are incorporated by reference in their entireties herein. In certain embodiments, a compound comprises an antisense oligonucleotide having a nucleobase sequence of any of SEQ ID NOs 15-270 disclosed in WO 2010/045509 and a conjugate group described herein. In certain embodiments, a compound comprises an antisense oligonucleotide having a nucleobase sequence of any of SEQ ID NOs 15-270 disclosed in WO 2010/121074 and a conjugate group described herein. The nucleobase sequences of all of the aforementioned referenced SEQ ID NOs are incorporated by reference herein.

[0880] In certain embodiments, a compound comprises an antisense oligonucleotide targeted to Hepatitis B Virus (HBV) known in the art and a conjugate group described herein. In certain embodiments, antisense oligonucleotides targeted to HBV are RNAi (siRNA or ssRNA) compounds. In certain embodiments, antisense oligonucleotides targeted to HBV are RNase H based antisense compounds. Examples of antisense oligonucleotides targeted to HBV suitable for conjugation include but are not limited to those disclosed in WO 2012/145697 and WO 2012/145697, which are incorporated by reference in their entireties herein. In certain embodiments, a compound comprises an antisense oligonucleotide having a nucleobase sequence of any of SEQ ID NOs 5-310, 321-802, 804-1272, 1288-1350, 1364-1372, 1375, 1376, and 1379 disclosed in WO 2012/145697 and a conjugate group described herein. In certain embodiments, a compound comprises an antisense oligonucleotide having a nucleobase sequence of any of SEQ ID NOs 14-22 disclosed in WO 2011/047312 and a conjugate group described herein. The nucleobase sequences of all of the aforementioned referenced SEQ ID NOs are incorporated by reference herein.

[0881] In certain embodiments, a compound comprises an antisense oligonucleotide targeted to transthyretin (TTR) known in the art and a conjugate group described herein. In certain embodiments, antisense oligonucleotides targeted to TTR are RNAi (siRNA or ssRNA) compounds.

[0882] In certain embodiments, antisense oligonucleotides targeted to TTR are RNase H based antisense compounds. Examples of antisense oligonucleotides targeted to TTR suitable for conjugation include but are not limited to those disclosed in WO 2011/139917 and U.S. Pat. No. 8,101,743, which are incorporated by reference in their entireties herein. In certain embodiments, a compound comprises an antisense oligonucleotide having a nucleobase sequence of any of SEQ ID NOs 8-160, 170-177 disclosed in WO 2011/139917 and a conjugate group described herein. In certain embodiments, a compound comprises an antisense oligonucleotide having a nucleobase sequence of any of SEQ ID NOs 12-89 disclosed in U.S. Pat. No. 8,101,743 and a conjugate group described herein. In certain embodiments, a compound comprises an antisense oligonucleotide having a nucleobase sequence complementary to a preferred target segment of any of SEQ ID NOs 90-133 disclosed in U.S. Pat. No. 8,101,743 and a conjugate group described herein. The nucleobase sequences of all of the aforementioned referenced SEQ ID NOs are incorporated by reference herein.

[0883] In certain embodiments, a compound comprises an antisense oligonucleotide targeted to apolipoprotein(a) (apo(a)) known in the art and a conjugate group described herein. In certain embodiments, antisense oligonucleotides targeted to apo(a) are RNAi (siRNA or ssRNA) compounds. In certain embodiments, antisense oligonucleotides targeted to apo(a) are RNase H based antisense compounds. Examples of antisense oligonucleotides targeted to apo(a) suitable for conjugation include but are not limited to those disclosed in WO 2013/177468; U.S. Pat. No. 8,673,632; U.S. Pat. No. 7,259,150; and US Patent Application Publication No. US 2004/0242516; which are incorporated by reference in their entireties herein. In certain embodiments, a compound comprises an antisense oligonucleotide having a nucleobase sequence of any of SEQ ID NOs 12-130, 133, 134 disclosed in WO 2013/177468 and a conjugate group described herein. In certain embodiments, a compound comprises an antisense oligonucleotide having a nucleobase sequence of any of SEQ ID NOs 11-45 and 85-96 disclosed in U.S. Pat. No. 8,673,632 and a conjugate group described herein. In certain embodiments, a compound comprises an antisense oligonucleotide having a nucleobase sequence of any of SEQ ID NOs 11-45 disclosed in U.S. Pat. No. 7,259,150 and a conjugate group described herein. In certain embodiments, a compound comprises an antisense oligonucleotide having a nucleobase sequence of any of SEQ ID NOs 7-41 disclosed in US Patent Application Publication No. US 2004/0242516 and a conjugate group described herein. The nucleobase sequences of all of the aforementioned referenced SEQ ID NOs are incorporated by reference herein.

[0884] In certain embodiments, a compound comprises an antisense oligonucleotide targeted to Apolipoprotein B (ApoB) known in the art and a conjugate group described herein. In certain embodiments, antisense oligonucleotides targeted to ApoB are RNAi (siRNA or ssRNA) compounds. In certain embodiments, antisense oligonucleotides targeted to ApoB are RNase H based antisense compounds. Examples of antisense oligonucleotides targeted to ApoB suitable for conjugation include but are not limited to those disclosed in US Patent Application Publication Nos. US 2010/0331390, US 2009/0306180, and US 2005/0009088; which are incorporated by reference in their entireties herein. In certain embodiments, a compound comprises an antisense oligonucleotide having a nucleobase sequence of SEQ ID NO: 20 disclosed in US 2010/0331390 and a conjugate group described herein. In certain embodiments, a compound comprises an antisense oligonucleotide having a nucleobase sequence of any of SEQ ID NOs 16-213 disclosed in US 2009/0306180 and a conjugate group described herein. In certain embodiments, a compound comprises an antisense oligonucleotide having a nucleobase sequence of any of SEQ ID NOs 17-70, 124-317, 319-333, 335-502, 504-804, and 864-887 disclosed in US 2005/0009088 and a conjugate group described herein. The nucleobase sequences of all of the aforementioned referenced SEQ ID NOs are incorporated by reference herein.

[0885] In certain embodiments, a compound comprises an antisense oligonucleotide targeted to Apolipoprotein C-III (ApoC-III) known in the art and a conjugate group described herein. In certain embodiments, antisense oligonucleotides targeted to ApoC-III are RNAi (siRNA or ssRNA) compounds. In certain embodiments, antisense oligonucleotides targeted to ApoC-III are RNase H based antisense compounds. Examples of antisense oligonucleotides targeted to ApoC-III suitable for conjugation include but are not limited to those disclosed in US Patent Application Publication No. US 2013/0317085, which is incorporated by reference in its entirety herein. In certain embodiments, a compound comprises an antisense oligonucleotide having a nucleobase sequence of any of SEQ ID NOs 19-96 and 209-221 disclosed in US 2013/0317085 and a conjugate group described herein. The nucleobase sequences of all of the aforementioned referenced SEQ ID NOs are incorporated by reference herein.

[0886] In certain embodiments, a compound comprises an antisense oligonucleotide targeted to proprotein convertase subtilisin/kexin type 9 (PCSK9) known in the art and a conjugate group described herein. In certain embodiments, antisense oligonucleotides targeted to PCSK9 are RNAi (siRNA or ssRNA) compounds. In certain embodiments, antisense oligonucleotides targeted to PCSK9 are RNase H based antisense compounds. Examples of antisense oligonucleotides targeted to PCSK9 suitable for conjugation include but are not limited to those disclosed in U.S. Pat. No. 8,143,230 and U.S. Pat. No. 8,664,190; which are incorporated by reference in their entireties herein. In certain embodiments, a compound comprises an antisense oligonucleotide having a nucleobase sequence of any of SEQ ID NOs 329-403 disclosed in U.S. Pat. No. 8,143,230 and a conjugate group described herein. In certain embodiments, a compound comprises an antisense oligonucleotide having a nucleobase sequence of any of SEQ ID NOs 4-455 and 458-461 disclosed in U.S. Pat. No. 8,664,190 and a conjugate group described herein. The nucleobase sequences of all of the aforementioned referenced SEQ ID NOs are incorporated by reference herein.

[0887] In certain embodiments, a compound comprises an antisense oligonucleotide targeted to C-reactive protein (CRP) known in the art and a conjugate group described herein. In certain embodiments, antisense oligonucleotides targeted to CRP are RNAi (siRNA or ssRNA) compounds. In certain embodiments, antisense oligonucleotides targeted to CRP are RNase H based antisense compounds. Examples of antisense oligonucleotides targeted to CRP suitable for conjugation include but are not limited to those disclosed in WO 2003/010284, WO 2005/005599, and WO 2007/143317; which are incorporated by reference in their entireties herein. In certain embodiments, a compound comprises an antisense oligonucleotide having a nucleobase sequence of any of SEQ ID NOs 10-63 disclosed in WO 2003/010284 and a conjugate group described herein.

[0888] In certain embodiments, a compound comprises an antisense oligonucleotide having a nucleobase sequence of any of SEQ ID NOs 19-72, 76-259, and 598-613 disclosed in WO 2005/005599 and a conjugate group described herein. In certain embodiments, a compound comprises an antisense oligonucleotide having a nucleobase sequence of any of SEQ ID NOs 409-412 disclosed in WO 2007/143317 and a conjugate group described herein. The nucleobase sequences of all of the aforementioned referenced SEQ ID NOs are incorporated by reference herein.

### G. Certain Pharmaceutical Compositions

[0889] In certain embodiments, the present disclosure provides pharmaceutical compositions comprising one or more antisense compound. In certain embodiments, such pharmaceutical composition comprises a suitable pharmaceutically acceptable diluent or carrier. In certain embodiments, a pharmaceutical composition comprises a sterile saline solution and one or more antisense compound. In certain embodiments, such pharmaceutical composition consists of a sterile saline solution and one or more antisense compound. In certain embodiments, the sterile saline is pharmaceutical grade saline. In certain embodiments, a pharmaceutical composition comprises one or more antisense compound and sterile water. In certain embodiments, a pharmaceutical composition consists of one or more antisense compound and sterile water. In certain embodiments, the sterile saline is pharmaceutical grade water. In certain embodiments, a pharmaceutical composition comprises one or more antisense compound and phosphate-buffered saline (PBS). In certain embodiments, a pharmaceutical composition consists of one or more antisense compound and sterile phosphate-buffered saline (PBS). In certain embodiments, the sterile saline is pharmaceutical grade PBS.

[0890] In certain embodiments, antisense compounds may be admixed with pharmaceutically acceptable active and/or inert substances for the preparation of pharmaceutical compositions or formulations. Compositions and methods for the formulation of pharmaceutical compositions depend on a number of criteria, including, but not limited to, route of administration, extent of disease, or dose to be administered.

[0891] Pharmaceutical compositions comprising antisense compounds encompass any pharmaceutically acceptable salts, esters, or salts of such esters. In certain embodiments, pharmaceutical compositions comprising antisense compounds comprise one or more oligonucleotide which, upon administration to an animal, including a human, is capable of providing (directly or indirectly) the biologically active metabolite or residue thereof. Accordingly, for example, the disclosure is also drawn to pharmaceutically acceptable salts of antisense compounds, prodrugs, pharmaceutically acceptable salts of such prodrugs, and other bioequivalents. Suitable pharmaceutically acceptable salts include, but are not limited to, sodium and potassium salts.

[0892] A prodrug can include the incorporation of additional nucleosides at one or both ends of an oligonucleotide which are cleaved by endogenous nucleases within the body, to form the active antisense oligonucleotide.

[0893] Lipid moieties have been used in nucleic acid therapies in a variety of methods. In certain such methods, the nucleic acid is introduced into preformed liposomes or lipoplexes made of mixtures of cationic lipids and neutral lipids. In certain methods, DNA complexes with mono- or poly-cationic lipids are formed without the presence of a neutral lipid. In certain embodiments, a lipid moiety is selected to increase distribution of a pharmaceutical agent to a particular cell or tissue. In certain embodiments, a lipid moiety is selected to increase distribution of a pharmaceutical agent to fat tissue. In certain embodiments, a lipid moiety is selected to increase distribution of a pharmaceutical agent to muscle tissue.

[0894] In certain embodiments, pharmaceutical compositions provided herein comprise one or more modified oligonucleotides and one or more excipients. In certain such embodiments, excipients are selected from water, salt solutions, alcohol, polyethylene glycols, gelatin, lactose, amylase, magnesium stearate, talc, silicic acid, viscous paraffin, hydroxymethylcellulose and polyvinylpyrrolidone.

[0895] In certain embodiments, a pharmaceutical composition provided herein comprises a delivery system. Examples of delivery systems include, but are not limited to, liposomes and emulsions. Certain delivery systems are useful for preparing certain pharmaceutical compositions including those comprising hydrophobic compounds. In certain embodiments, certain organic solvents such as dimethylsulfoxide are used.

[0896] In certain embodiments, a pharmaceutical composition provided herein comprises one or more tissue-specific delivery molecules designed to deliver the one or more pharmaceutical agents of the present disclosure to specific tissues or cell types. For example, in certain embodiments, pharmaceutical compositions include liposomes coated with a tissue-specific antibody.

[0897] In certain embodiments, a pharmaceutical composition provided herein comprises a co-solvent system. Certain of such co-solvent systems comprise, for example, benzyl alcohol, a nonpolar surfactant, a water-miscible organic polymer, and an aqueous phase. In certain embodiments, such co-solvent systems are used for hydrophobic compounds. A non-limiting example of such a co-solvent system is the VPD co-solvent system, which is a solution of absolute ethanol comprising 3% w/v benzyl alcohol, 8% w/v of the nonpolar surfactant Polysorbate 80™ and 65% w/v polyethylene glycol 300. The proportions of such co-solvent systems may be varied considerably without significantly altering their solubility and toxicity characteristics. Furthermore, the identity of co-solvent components may be varied: for example, other surfactants may be used instead of Polysorbate 80™; the fraction size of polyethylene glycol may be varied; other biocompatible polymers may replace polyethylene glycol, e.g., polyvinyl pyrrolidone; and other sugars or polysaccharides may substitute for dextrose.

[0898] In certain embodiments, a pharmaceutical composition provided herein is prepared for oral administration. In certain embodiments, pharmaceutical compositions are prepared for buccal administration.

[0899] In certain embodiments, a pharmaceutical composition is prepared for administration by injection (e.g., intravenous, subcutaneous, intramuscular, etc.). In certain of such embodiments, a pharmaceutical composition comprises a carrier and is formulated in aqueous solution, such as water or physiologically compatible buffers such as Hanks's solution, Ringer's solution, or physiological saline buffer. In certain embodiments, other ingredients are included (e.g., ingredients that aid in solubility or serve as preservatives). In certain embodiments, injectable suspensions are prepared using appropriate liquid carriers, suspending agents and the like. Certain pharmaceutical compositions for injection are presented in unit dosage form, e.g., in ampoules or in multi-dose containers. Certain pharmaceutical compositions for injection are suspensions, solutions or emulsions in oily or aqueous vehicles, and may contain formulatory agents such as suspending, stabilizing and/or dispersing agents. Certain solvents suitable for use in pharmaceutical compositions for injection include, but are not limited to, lipophilic solvents and fatty oils, such as sesame oil, synthetic fatty acid esters, such as ethyl oleate or triglycerides, and liposomes. Aqueous injection suspensions may contain substances that increase the viscosity of the suspension, such as sodium carboxymethyl cellulose, sorbitol, or dextran. Optionally, such suspensions may also contain suitable stabilizers or agents that increase the solubility of the pharmaceutical agents to allow for the preparation of highly concentrated solutions.

[0900] In certain embodiments, a pharmaceutical composition is prepared for transmucosal administration. In certain of such embodiments penetrants appropriate to the barrier to be permeated are used in the formulation. Such penetrants are generally known in the art.

[0901] In certain embodiments, a pharmaceutical composition provided herein comprises an oligonucleotide in a therapeutically effective amount. In certain embodiments, the therapeutically effective amount is sufficient to prevent, alleviate or ameliorate symptoms of a disease or to prolong the survival of the subject being treated. Determination of a therapeutically effective amount is well within the capability of those skilled in the art.

[0902] In certain embodiments, one or more modified oligonucleotide provided herein is formulated as a prodrug. In certain embodiments, upon in vivo administration, a prodrug is chemically converted to the biologically, pharmaceutically or therapeutically more active form of an oligonucleotide. In certain embodiments, prodrugs are useful because they are easier to administer than the corresponding active form. For example, in certain instances, a prodrug may be more bioavailable (e.g., through oral administration) than is the corresponding active form. In certain instances, a prodrug may have improved solubility compared to the corresponding active form. In certain embodiments, prodrugs are less water soluble than the corresponding active form. In certain instances, such prodrugs possess superior transmittal across cell membranes, where water solubility is detrimental to mobility. In certain embodiments, a prodrug is an ester. In certain such embodiments, the ester is metabolically hydrolyzed to carboxylic acid upon administration. In certain instances the carboxylic acid containing compound is the corresponding active form. In certain embodiments, a prodrug comprises a short peptide (polyaminoacid) bound to an acid group. In certain of such embodiments, the peptide is cleaved upon administration to form the corresponding active form.

[0903] In certain embodiments, the present disclosure provides compositions and methods for reducing the amount or activity of a target nucleic acid in a cell. In certain embodiments, the cell is in an animal. In certain embodiments, the animal is a mammal. In certain embodiments, the animal is a rodent. In certain embodiments, the animal is a primate. In certain embodiments, the animal is a non-human primate. In certain embodiments, the animal is a human.

[0904] In certain embodiments, the present disclosure provides methods of administering a pharmaceutical composition comprising an oligonucleotide of the present disclosure to an animal. Suitable administration routes include, but are not limited to, oral, rectal, transmucosal, intestinal, enteral, topical, suppository, through inhalation, intrathecal, intracerebroventricular, intraperitoneal, intranasal, intraocular, intratumoral, and parenteral (e.g., intravenous, intramuscular, intramedullary, and subcutaneous). In certain embodiments, pharmaceutical intrathecals are administered to achieve local rather than systemic exposures. For example, pharmaceutical compositions may be injected directly in the area of desired effect (e.g., into the liver).

### Nonlimiting Disclosure and Incorporation by Reference

[0905] While certain compounds, compositions and methods described herein have been described with specificity in accordance with certain embodiments, the following examples serve only to illustrate the compounds described herein and are not intended to limit the same. Each of the references, GenBank accession numbers, and the like recited in the present application is incorporated herein by reference in its entirety.

[0906] Certain compounds, compositions, and methods herein are described as “comprising exactly” or “comprises exactly” a particular number of a particular element or feature. Such descriptions are used to indicate that while the compound, composition, or method may comprise additional other elements, the number of the particular element or feature is the identified number. For example, “a conjugate comprising exactly one GalNAc” is a conjugate that contains one and only one GalNAc, though it may contain other elements in addition to the one GalNAc.

[0907] Although the sequence listing accompanying this filing identifies each sequence as either “RNA” or “DNA” as required, in reality, those sequences may be modified with any combination of chemical modifications. One of skill in the art will readily appreciate that such designation as “RNA” or “DNA” to describe modified oligonucleotides is, in certain instances, arbitrary. For example, an oligonucleotide comprising a nucleoside comprising a 2′-OH sugar moiety and a thymine base could be described as a DNA having a modified sugar (2′-OH for the natural 2′-H of DNA) or as an RNA having a modified base (thymine (methylated uracil) for natural uracil of RNA).

[0908] Accordingly, nucleic acid sequences provided herein, including, but not limited to those in the sequence listing, are intended to encompass nucleic acids containing any combination of natural or modified RNA and/or DNA, including, but not limited to such nucleic acids having modified nucleobases. By way of further example and without limitation, an oligonucleotide having the nucleobase sequence “ATCGATCG” encompasses any oligonucleotides having such nucleobase sequence, whether modified or unmodified, including, but not limited to, such compounds comprising RNA bases, such as those having sequence “AUCGAUCG” and those having some DNA bases and some RNA bases such as “AUCGATCG” and oligonucleotides having other modified bases, such as “AT^{me}CGAUCG,” wherein ^{me}C indicates a cytosine base comprising a methyl group at the 5-position.

### EXAMPLES

[0909] The following examples illustrate certain embodiments of the present disclosure and are not limiting. Moreover, where specific embodiments are provided, the inventors have contemplated generic application of those specific embodiments. For example, disclosure of an oligonucleotide having a particular motif provides reasonable support for additional oligonucleotides having the same or similar motif. And, for example, where a particular high-affinity modification appears at a particular position, other high-affinity modifications at the same position are considered suitable, unless otherwise indicated.

### Example 1: General Method for the Preparation of an Oligomeric Compound Comprising a GalNAc₃-3 Conjugate at the 5′ Terminus

[chemical structure]

[chemical structure]

[chemical structure]

[0911] Compounds 1, 2, 7, 12, and 14 are commercially available. Compound 10 was prepared using similar procedures reported by Rensen et al., J. Med. Chem., 2004, 47, 5798-5808. Oligomeric compound 16 comprising a phosphodiester linked hexylamine is prepared using standard oligonucleotide synthesis procedures. Treatment of the protected oligomeric compound with aqueous ammonia provided the 5′-GalNAc₃-3 conjugated oligomeric compound (18). The GalNAc₃ cluster portion of the conjugate group GalNAc₃-3 (GalNAc₃-3ₐ) can be combined with any cleavable moiety to provide a variety of conjugate groups, wherein GalNAc₃-3ₐ has the formula:

[chemical structure]

### Example 2: General Method for the Preparation of an Oligomeric Compound Comprising a GalNAc₃-7 Conjugate at the 5′ Terminus

[chemical structure]

[chemical structure]

[chemical structure]

[0913] Compound 21 was synthesized following the procedure described in the literature (J. Med. Chem. 2004, 47, 5798-5808). The remaining reactions were performed as shown via standard organic chemistry methods, and oligomeric compound 29, comprising a GalNAc₃-7 conjugate group, is prepared using the general procedures illustrated in Example 1. The GalNAc₃ cluster portion of the conjugate group GalNAc₃-7 (GalNAc₃-7ₐ) can be combined with any cleavable moiety to provide a variety of conjugate groups. The structure of GalNAc₃-7 (GalNAc₃-7ₐ-CM-) is shown below:

[chemical structure]

### Example 3: General Method for the Preparation of an Oligomeric Compound Comprising a GalNAc₃-10 Conjugate at the 5′ Terminus

[chemical structure]

[chemical structure]

[chemical structure]

[0915] Oligomeric compound 40 comprises a GalNAc₃-10 conjugate. The GalNAc₃ cluster portion of the conjugate group GalNAc₃-10 (GalNAc₃-10ₐ) can be combined with any cleavable moiety to provide a variety of conjugate groups. The structure of GalNAc₃-10 (GalNAc₃-10ₐ-CM-) is shown below:

[chemical structure]

### Example 4: General Method for the Preparation of an Oligomeric Compound Comprising a GalNAc₃-13 Conjugate at the 5′ Terminus

[chemical structure]

[chemical structure]

[0917] Oligomeric compound 46 comprises a GalNAc₃-13 conjugate group. The GalNAc₃ cluster portion of the conjugate group GalNAc₃-13 (GalNAc₃-13ₐ) can be combined with any cleavable moiety to provide a variety of conjugate groups. The structure of GalNAc₃-13 (GalNAc₃-13ₐ-CM-) is shown below:

[chemical structure]

### Example 5: General Method for the Preparation of an Oligomeric Compound Comprising a GalNAc₃-19 Conjugate at the 3′ Terminus

[chemical structure]

[0919] Oligomeric compound 50 comprises a GalNAc₃-19 conjugate group. The GalNAc₃ cluster portion of the conjugate group GalNAc₃-19 (GalNAc₃-19ₐ) can be combined with any cleavable moiety to provide a variety of conjugate groups. The structure of GalNAc₃-19 (GalNAc₃-19ₐ-CM-) is shown below:

[chemical structure]

### Example 6: General Method for the Preparation of an Oligomeric Compound Comprising a GalNAc₃-1 Conjugate at the 3′ Terminus

[chemical structure]

[chemical structure]

[0921] Oligomeric compound 54 comprises a GalNAc₃-1 conjugate group. The GalNAc₃ cluster portion of the conjugate group GalNAc₃-1 (GalNAc₃-1ₐ) can be combined with any cleavable moiety to provide a variety of conjugate groups. The structure of GalNAc₃-1 (GalNAc₃-1ₐ-CM-) is shown below:

[chemical structure]

### Example 7: Stability of an Antisense Oligonucleotide Comprising a GalNAc Cluster in Rat Jejunum

[0922] ISIS 656172, an antisense oligonucleotide comprising a GalNAc₃-1 cluster and targeting mouse Factor XI, was tested in a stability study in rat jejunum. ISIS 656172 is a gapmer comprising 2′-methoxyethyl (MOE) modifications in the wings, and the cleavable moiety linking the 3′-GalNAc₃-1 cluster to the oligonucleotide is a phosphodiester linked deoxyadenosine. The sequence of ISIS 656172 is 5′-TGGTAATCCACTTTCAGAGGA-3′ (SEQ ID NO: 142), the cytosines are 5-methylcytosines, and the internucleoside linkages are phosphorothioate except for the phosphodiester linkage between the guanosine and the deoxyadenosine at the 3′-end.

[0923] Male Sprague Dawley rats were fasted overnight, then anesthetized with isofluorance. A ten centimeter segment of each rat's mid-jejunum was exposed and tied with suture thread to isolate it from the rest of the jejunum. Each segment was injected with 0.25 mL saline or 150 mg/mL sodium caprate (C10) with or without ISIS 656172 at one of the dosages shown in Table 22 below. Each treatment group consisted of 1 animal. After a one hour incubation, the jejunum segments were rinsed with saline containing an internal standard oligonucleotide, and the segment contents were collected and analyzed by HPLC-MS. The amounts of ISIS 656172 and the “parent oligonucleotide” that does not comprise a GalNAc cluster were measured relative to the internal standard (IS). Additional ISIS 656172 degradation products were measured and used to determine the percentage of recovered oligonucleotide that was intact ISIS 656172. The results are shown in Table 22.

[0924] As illustrated in Table 22, ISIS 656172, an antisense oligonucleotide comprising a GalNAc cluster, was stable in the rat jejunum for a duration of one hour.

TABLE 22
Ratios of antisense oligonucleotide:internal
standard (IS) recovered from rat jejunum

| | ISIS | | | % of recovered |
|---|---|---|---|---|
| | 656172 | | Parent | oligonucleotide |
| | dosage | ISIS | oligo- | that was intact |
| Vehicle | (mg/mL) | 656172:IS | nucleotide:IS | ISIS 656172 |
| Saline | 1 | 0.185 | 0.009 | 95.3 |
| C10 | 1 | 0.207 | 0.010 | 95.5 |
| Saline | 10 | 1.24 | 0.055 | 95.8 |
| C10 | 10 | 1.35 | 0.065 | 95.4. |

### Example 8: Stability of Antisense Oligonucleotides Comprising Various GalNAc Clusters in Rat Jejunum

[0925] The oligonucleotides listed in Table 23 below were tested in a stability study in rat jejunum. ISIS 3521 is known to be unstable in the jejunum and was included as a control. If present, the GalNAc cluster and cleavable moiety is bolded in each sequence.

TABLE 23

| | | SEQ |
|---|---|---|
| ISIS | | ID |
| No. | Sequences (5′ to 3′) | No. |
| 3521 | G_{ds}T_{ds}T_{ds}C_{ds}T_{ds}C_{ds}G_{ds}C_{ds}T_{ds}G_{ds}G_{ds}T_{ds}G_{ds}A_{ds}G_{ds}T_{ds}T_{ds}T_{ds}C_{ds}A_{d} | 143 |
| 440670 | ^{m}CₑₛAₑₛGₑₛ^{m}CₑₛTₑₛT_{ds}T_{ds}A_{ds}T_{ds}T_{ds}A_{ds}G_{ds}G_{ds}G_{ds}A_{ds}^{m}CₑₛAₑₛGₑₛ^{m}CₑₛAₑ | 144 |
| 661180 | ^{m}CₑₛAₑₛGₑₛ^{m}CₑₛTₑₛT_{ds}T_{ds}A_{ds}T_{ds}T_{ds}A_{ds}G_{ds}G_{ds}G_{ds}A_{ds}^{m}CₑₛAₑₛGₑₛ^{m}CₑₛAₑₒA_{do}′-GalNAc₃-1ₐ | 145 |
| 680771 | GalNAc₃-3_{a-o′}^{m}CₑₛAₑₛGₑₛ^{m}CₑₛTₑₛT_{ds}T_{ds}A_{ds}T_{ds}T_{ds}A_{ds}G_{ds}G_{ds}G_{ds}A_{ds}^{m}CₑₛAₑₛGₑₛ^{m}CₑₛAₑ | 144 |
| 680772 | GalNAc₃-7_{a-o′}^{m}CₑₛAₑₛGₑₛ^{m}CₑₛTₑₛT_{ds}T_{ds}A_{ds}T_{ds}T_{ds}A_{ds}G_{ds}G_{ds}G_{ds}A_{ds}^{m}CₑₛAₑₛGₑₛ^{m}CₑₛAₑ | 144 |
| 680773 | GalNAc₃-10_{a-o′}^{m}CₑₛAₑₛGₑₛ^{m}CₑₛTₑₛT_{ds}T_{ds}A_{ds}T_{ds}T_{ds}A_{ds}G_{ds}G_{ds}G_{ds}A_{ds}^{m}CₑₛAₑₛGₑₛ^{m}CₑₛAₑ | 144 |
| 680774 | GalNAc₃-13_{a-o′}^{m}CₑₛAₑₛGₑₛ^{m}CₑₛTₑₛT_{ds}T_{ds}A_{ds}T_{ds}T_{ds}A_{ds}G_{ds}G_{ds}G_{ds}A_{ds}^{m}CₑₛAₑₛGₑₛ^{m}CₑₛAₑ | 144 |

[0926] In the sequences in all tables, capital letters indicate the nucleobase for each nucleoside and ^{m}C indicates a 5-methylcytosine. Subscripts: “e” indicates a 2′-MOE modified nucleoside; “d” indicates a 3-D-2′-deoxyribonucleoside; “s” indicates a phosphorothioate internucleoside linkage (PS); “o” indicates a phosphodiester internucleoside linkage (PO); and “o′” indicates —O—P(═O)(OH)—.

[0927] Male Sprague Dawley rats were treated as described in Example 7, and the results are shown in Table 24. The treatment group that received ISIS 3521 consisted of two animals. The “full oligonucleotide” comprises the intact GalNAc cluster (if present), and the “parent oligonucleotide” is the intact oligonucleotide that does not comprise a GalNAc cluster. For ISIS 3521 and 440670, which do not comprise a GalNAc cluster, the “full” and “parent” oligonucleotides are the same compounds.

TABLE 24
Ratios of antisense oligonucleotide:internal
standard (IS) recovered from rat jejunum

| | | | | | % of recovered |
|---|---|---|---|---|---|
| | | | Full | Parent | oligonucleotide |
| | | | oligo- | oligo- | that was intact, |
| | ISIS | Dosage | nucleo- | nucleo- | full oligonu- |
| Vehicle | No. | (mg/mL) | tide:IS | tide:IS | cleotide |
| C10 | 3521 | 10 | 2.59 | n/a | 76.0 |
| C10 | 440670 | 10 | 0.74 | n/a | 100.0 |
| C10 | 661180 | 10 | 2.10 | 0.00 | 100.0 |
| C10 | 680771 | 10 | 0.96 | 0.00 | 100.0 |
| C10 | 680772 | 10 | 1.14 | 0.00 | 100.0 |
| C10 | 680773 | 10 | 1.43 | 0.00 | 100.0 |
| C10 | 680774 | 10 | 1.44 | 0.01 | 93.4. |

### Example 9: Bioavailability of Antisense Oligonucleotides Comprising Various GalNAc Clusters Administered Intrajejunally

[0928] Antisense oligonucleotides targeting rat metastasis associated lung adenocarcinoma transcript 1 (MALAT-1) are tested in a bioavailability study in rat. The oligonucleotides are gapmers that are 16 nucleotides in length, comprising cEt modifications in the wings that are each three nucleotides in length. Each pair of oligonucleotides contains the same sequence, the “parent” does not comprise a GalNAc cluster, and the second oligonucleotide comprises a GalNAc₃-7 cluster attached to the 5′-end of the oligonucleotide via a cleavable phosphodiester linkage. For example, the oligonucleotides in Table 25 will be tested for bioavailability in rat.

TABLE 25
Antisense oligonucleotides for use
in bioavailability testing in rat

| ISIS | | SEQ |
|---|---|---|
| No. | Sequences (5′ to 3′) | ID No. |
| 556116 | Aₖₛ^{m}Cₖₛ^{m}CₖₛA_{ds}T_{ds}G_{ds}A_{ds}T_{ds} | 146 |
| | A_{ds}^{m}C_{ds}^{m}C_{ds}A_{ds}^{m}C_{ds}TₖₛTₖₛTₖ | |
| 704361 | GalNAc₃-7_{a-o′} Aₖₛ^{m}Cₖₛ^{m}CₖₛA_{ds}T_{ds}G_{ds} | 146 |
| | A_{ds}T_{ds}A_{ds}^{m}C_{ds}^{m}C_{ds}A_{ds}^{m}C_{ds}TₖₛTₖₛTₖ | |

Subscript “k” indicates a cEt modified nucleoside. See Table 24 for list of other abbreviations.

[0929] The oligonucleotides are administered to Sprague Dawley rats intrajejunally. After the animals are sacrificed, MALAT-1 mRNA levels in the liver are analyzed by RT-PCR.

### Example 10: General Method for the Preparation of an Oligomeric Compound Comprising a GalNAc₂-24 Conjugate at the 5′ Terminus

[chemical structure]

[chemical structure]

[0931] Compound 55 is commercially available, and compound 56 was synthesized following the procedure described in the literature (J. Am. Chem. Soc. 2011, 133, 958-963). Compound 55 (1 g, 2.89 mmol), HBTU (0.39 g, 2.89 mmol), and HOBt (1.64 g, 4.33 mmol) were dissolved in DMF (10 mL. and N,N-diisopropylethylamine (1.75 mL, 10.1 mmol) were added. After about 5 min, aminohexanoic acid benzyl ester (1.36 g, 3.46 mmol) was added to the reaction. After 3 h, the reaction mixture was poured into 100 mL of 1 M NaHSO4 and extracted with 2×50 mL ethyl acetate. Organic layers were combined and washed with 3×40 mL sat NaHCO₃ and 2× brine, dried with Na₂SO₄, filtered and concentrated. The product was purified by silica gel column chromatography (DCM:EA:Hex, 1:1:1) to yield compound 57. LCMS and NMR were consistent with the structure. Compound 57 (1.34 g, 2.438 mmol) was dissolved in dichloromethane (10 mL) and trifluoracetic acid (10 mL) was added. After stirring at room temperature for 2 h, the reaction mixture was concentrated under reduced pressure and co-evaporated with toluene (3×10 mL). The residue was dried under reduced pressure to yield compound 58 as the trifluoracetate salt. Compound 59 (3.39 g, 5.40 mmol) was dissolved in DMF (3 mL). A solution of compound 58 (1.3 g, 2.25 mmol) was dissolved in DMF (3 mL) and N,N-diisopropylethylamine (1.55 mL) was added. The reaction was stirred at room temperature for 30 minutes, then poured into water (80 mL) and the aqueous layer was extracted with EtOAc (2×100 mL). The organic phase was separated and washed with sat. aqueous NaHCO₃ (3×80 mL), 1 M NaHSO₄ (3×80 mL) and brine (2×80 mL), then dried (Na₂SO₄), filtered, and concentrated. The residue was purified by silica gel column chromatography to yield compound 60. LCMS and NMR were consistent with the structure.

[0932] Compound 60 (0.59 g, 0.48 mmol) was dissolved in methanol (2.2 mL) and ethyl acetate (2.2 mL). Palladium on carbon (10 wt % Pd/C, wet, 0.07 g) was added, and the reaction mixture was stirred under hydrogen atmosphere for 3 h. The reaction mixture was filtered through a pad of Celite and concentrated to yield the carboxylic acid. The carboxylic acid (1.32 g, 1.15 mmol, cluster free acid) was dissolved in DMF (3.2 mL). To this N,N-diisopropylehtylamine (0.3 mL, 1.73 mmol) and PFPTFA (0.30 mL, 1.73 mmol) were added. After 30 min stirring at room temperature the reaction mixture was poured into water (40 mL) and extracted with EtOAc (2×50 mL). A standard work-up was completed as described above to yield compound 61. LCMS and NMR were consistent with the structure. Oligomeric compound 62 comprises a GalNAc₂-24 conjugate group. The GalNAc₂ cluster portion (GalNAc₂-24ₐ) of the conjugate group GalNAc₂-24 can be combined with any cleavable moiety present on the oligonucleotide to provide a variety of conjugate groups. The structure of GalNAc₂-24 (GalNAc₂-24ₐ-CM) is shown below:

[chemical structure]

### Example 11: General Methods for the Preparation of Oligomeric Compounds Comprising a GalNAc₁-25 Conjugate at the 5′ Terminus

[chemical structure]

[0934] Oligonucleotide 63 comprises a GalNAc₁-25 conjugate group. Alternatively, oligonucleotide 63 was synthesized using the scheme shown below.

[chemical structure]

[0935] The GalNAc₁ cluster portion (GalNAc₁-25ₐ) of the conjugate group GalNAc₁-25 can be combined with any cleavable moiety present on the oligonucleotide to provide a variety of conjugate groups. The structure of GalNAc₁-25 (GalNAc₁-25ₐ-CM) is shown below:

[chemical structure]

### Example 12: General Methods for the Preparation of Oligomeric Compounds Comprising a GalNAc₁-26 Conjugate at the 5′ Terminus or a GalNAc₁-27 Conjugate at the 3′ Terminus

[chemical structure]

[0937] Oligonucleotide 67 is synthesized via coupling of compound 47 to acid 41 (see Example 5) using HBTU and DIEA in DMF. The resulting amide containing compound is phosphitylated, then added to the 5′-end of an oligonucleotide. The GalNAc₁ cluster portion (GalNAc₁-26ₐ) of the conjugate group GalNAc₁-26 can be combined with any cleavable moiety present on the oligonucleotide to provide a variety of conjugate groups. The structure of GalNAc₁-26 (GalNAc₁-26ₐ-CM) is shown below:

[chemical structure]

[0938] In order to add the GalNAc₁ conjugate group to the 3′-end of an oligonucleotide, the amide formed from the reaction of compounds 47 and 41 is added to a solid support. The oligonucleotide synthesis is then completed in order to form oligonucleotide 68, which comprises a GalNAc₁-27 conjugate group.

[chemical structure]

[0939] The GalNAc₁ cluster portion (GalNAc₁-27ₐ) of the conjugate group GalNAc₁-27 can be combined with any cleavable moiety present on the oligonucleotide to provide a variety of conjugate groups. The structure of GalNAc₁-27 (GalNAc₁-27ₐ-CM) is shown below:

[chemical structure]

### Example 13: General Methods for the Preparation of Oligomeric Compounds Comprising a GalNAc₁-28 Conjugate at the 5′ Terminus or a GalNAc₁-29 Conjugate at the 3′ Terminus

[chemical structure]

[chemical structure]

[0941] Oligonucleotide 74, which comprises a GalNAc₁-28 conjugate group, is synthesized by adding phosphoramidite 73 to the 5′-end of an oligonucleotide attached to a solid support. The GalNAc₁ cluster portion (GalNAc₁-28ₐ) of the conjugate group GalNAc₁-28 can be combined with any cleavable moiety present on the oligonucleotide to provide a variety of conjugate groups. The structure of GalNAc₁-28 (GalNAc₁-28ₐ-CM) is shown below:

[chemical structure]

[0942] In order to add the GalNAc₁ conjugate group to the 3′-end of an oligonucleotide, compound 72 is added to a solid support, and oligonucleotide synthesis is then completed. The resulting oligonucleotide 75 comprises a GalNAc₁-29 conjugate group.

[chemical structure]

[0943] The GalNAc₁ cluster portion (GalNAc₁-29ₐ) of the conjugate group GalNAc₁-29 can be combined with any cleavable moiety present on the oligonucleotide to provide a variety of conjugate groups. The structure of GalNAc₁-29 (GalNAc₁-29ₐ-CM) is shown below:

[chemical structure]

### Example 14: General Method for the Preparation of an Oligomeric Compound Comprising a GalNAc₁-30 Conjugate at the 5′ Terminus

[chemical structure]

[0945] Oligonucleotide 79 comprises a GalNAc₁-30 conjugate group, wherein Y is selected from O, S, a substituted or unsubstituted C₁-C₁₀ alkyl, amino, substituted amino, azido, alkenyl or alkynyl. The GalNAc₁ cluster portion (GalNAc₁-30ₐ) of the conjugate group GalNAc₁-30 can be combined with any cleavable moiety to provide a variety of conjugate groups. In certain embodiments, Y is part of the cleavable moiety. In certain embodiments, Y is part of a stable moiety, and the cleavable moiety is present on the oligonucleotide. The structure of GalNAc₁-30ₐ is shown below:

[chemical structure]

### Example 15: General Methods for the Preparation of Oligomeric Compounds Comprising a GalNAc₂-31 Conjugate or a GalNAc₂-32 Conjugate at the 5′ Terminus

[chemical structure]

[0947] Oligonucleotide 83 comprises a GalNAc₂-31 conjugate group, wherein Y is selected from O, S, a substituted or unsubstituted C₁-C₁₀ alkyl, amino, substituted amino, azido, alkenyl or alkynyl. The GalNAc₂ cluster portion (GalNAc₂-31ₐ) of the conjugate group GalNAc₂-31 can be combined with any cleavable moiety to provide a variety of conjugate groups. In certain embodiments, the Y-containing group directly adjacent to the 5′-end of the oligonucleotide is part of the cleavable moiety. In certain embodiments, the Y-containing group directly adjacent to the 5′-end of the oligonucleotide is part of a stable moiety, and the cleavable moiety is present on the oligonucleotide. The structure of GalNAc₂-31a is shown below:

[chemical structure]

[0948] The synthesis of an oligonucleotide comprising a GalNAc₂-32 conjugate is shown below.

[chemical structure]

[0949] Oligonucleotide 85 comprises a GalNAc₂-32 conjugate group, wherein Y is selected from O, S, a substituted or unsubstituted C₁-C₁₀ alkyl, amino, substituted amino, azido, alkenyl or alkynyl. The GalNAc₂ cluster portion (GalNAc₂-32ₐ) of the conjugate group GalNAc₂-32 can be combined with any cleavable moiety to provide a variety of conjugate groups. In certain embodiments, the Y-containing group directly adjacent to the 5′-end of the oligonucleotide is part of the cleavable moiety. In certain embodiments, the Y-containing group directly adjacent to the 5′-end of the oligonucleotide is part of a stable moiety, and the cleavable moiety is present on the oligonucleotide. The structure of GalNAc₂-32ₐ is shown below:

[chemical structure]

### Example 16: Synthesis of Oligonucleotides Comprising a GalNAc Modified at the C6 Position

[chemical structure]

[chemical structure]

[0951] Compounds 87, 88, 89a, 89b, 90a, 90b, and 91 can be conjugated to an oligonucleotide of any sequence, resulting in a combinatorial library of oligonucleotides comprising a GalNAc conjugate, wherein the GalNAc is modified at the C6 position. The C6 position of the final product, compound 92a, comprises a primary amine (R₅ and R₆═H), an amino acid (R₅═H, R₆=amino acid) a peptide (R₅═H, R₆=peptide), or an alkylated amine (R₅═—CH₂—R₃, R₆=amino acid, peptide, or —C(O)—R₄, wherein R₃ and R₄ are substituent groups including but not limited to alkyl, alkenyl, and alkynyl groups); or the final product (compound 92b) comprises an azide. In 92a and 92b, n=1, 2, 3, 4, 5, or 6.

### Example 17: Synthesis of Oligonucleotides Comprising a GalNAc Modified at the C2 Position

[chemical structure]

[chemical structure]

[0953] Compounds 94, 95, 96a, 96b, 97a, 97b, and 98 can be conjugated to an oligonucleotide of any sequence, resulting in a combinatorial library of oligonucleotides comprising a GalNAc conjugate, wherein the GalNAc is modified at the C2 position. The C2 position of the final product, compound 99a, comprises a primary amine (R₅ and R₆═H), an amino acid (R₅═H, R₆=amino acid) a peptide (R₅═H, R₆=peptide), or an alkylated amine (R₅═—CH₂—R₃, R₆=amino acid, peptide, or —C(O)—R₄, wherein R₃ and R₄ are substituent groups including but not limited to alkyl, alkenyl, and alkynyl groups); or the final product (compound 99b) comprises an azide. In 99a and 99b, n=1, 2, 3, 4, 5, or 6.

### Example 18: Synthesis of Oligonucleotides Comprising a GalNAc Modified at the C2 and C6 Positions

[chemical structure]

[chemical structure]

[chemical structure]

[0955] Compounds 102, 103, 104a, 104b, 105a, 105b, and 106 can be conjugated to an oligonucleotide of any sequence, resulting in a combinatorial library of oligonucleotides comprising a GalNAc conjugate, wherein the GalNAc is modified at the C2 and C6 positions. The C6 position of the final product, compound 107a, comprises a primary amine (R₇ and R₈═H), an amino acid (R₇═H, R₈=amino acid) a peptide (R₇═H, R₈=peptide), or an alkylated amine (R₇═—CH₂—R₅, R₈=amino acid, peptide, or —C(O)—R₆, wherein R₅ and R₆ are substituent groups including but not limited to alkyl, alkenyl, and alkynyl groups); or the C6 position of the final product (compound 107b) comprises an azide. The C2 position of the final products, compounds 107a and 107b, comprises a substituted amine, wherein R₃ and R₄ are substituent groups including but not limited to alkyl, alkenyl, and alkynyl groups. In 107a and 107b, n=1, 2, 3, 4, 5, or 6.

### Example 19: Synthesis of Oligonucleotides Comprising Three Beta GalNAc Moieties Modified at the Anomeric Positions

[chemical structure]

[chemical structure]

[chemical structure]

[0957] Compound 114 can be conjugated to an oligonucleotide of any sequence, resulting in a variety of oligonucleotides represented by compound 115, wherein n=1, 2, 3, 4, 5, or 6. For example, compound 114 was conjugated to a 5′-hexylamino modified antisense oligonucleotide targeting mouse SRB-1 in order to prepare ISIS 709049, an example of compound 115, wherein n=6. The sequence of ISIS 709049 is 5′-AGCTTCAGTCATGACTTCCTT-3′ (SEQ ID NO: 141), wherein the cytosines are 5-methylcytosines, and the adenosine at the 5′-end is a 2′-deoxyadenosine that is the cleavable moiety linking the GalNAc conjugate to the oligonucleotide. The internucleoside linkages are phosphorothioate except for the linkage between the deoxyadenosine and guanosine, which is a phosphodiester linkage. The twenty phosphorothioate linked nucleotides of ISIS 709049 comprise a gapmer, wherein the wings comprise 2′-methoxyethyl (MOE) modifications and are each five nucleotides in length. The gap comprises 2′-deoxynucleotides and is 10 nucleotides in length.

### Example 20: Synthesis of Oligonucleotides Comprising Three Alpha GalNAc Moieties Modified at the Anomeric Positions

[chemical structure]

[chemical structure]

[0959] Compound 119 can be conjugated to an oligonucleotide of any sequence, resulting in a variety of oligonucleotides represented by compound 120, wherein n=1, 2, 3, 4, 5, or 6. For example, compound 119 was conjugated to a 5′-hexylamino modified antisense oligonucleotide targeting mouse SRB-1 in order to prepare ISIS 720333, an example of compound 120, wherein n=6. The sequence of ISIS 720333 is 5′-AGCTTCAGTCATGACTTCCTT-3′ (SEQ ID NO: 141), wherein the cytosines are 5-methylcytosines, and the adenosine at the 5′-end is a 2′-deoxyadenosine that is the cleavable moiety linking the GalNAc conjugate to the oligonucleotide. The internucleoside linkages are phosphorothioate except for the linkage between the deoxyadenosine and guanosine, which is a phosphodiester linkage. The twenty phosphorothioate linked nucleotides of ISIS 720333 comprise a gapmer, wherein the wings comprise 2′-methoxyethyl (MOE) modifications and are each five nucleotides in length. The gap comprises 2′-deoxynucleotides and is 10 nucleotides in length.

### Example 21: Synthesis of Oligonucleotides Comprising a Beta GalNAc Modified at the Anomeric Position

[chemical structure]

[0961] Compound 124 can be conjugated to an oligonucleotide of any sequence. In the final product, compound 125, n is 1, 2, 3, 4, 5, or 6. Alternatively, compound 129 below can be conjugated to the 5′-end of an oligonucleotide of any sequence using an automated oligonucleotide synthesizer, resulting in a variety of oligonucleotides represented by compound 130 below.

[chemical structure]

### Example 22: Synthesis of Oligonucleotides Comprising an Alpha GalNAc Modified at the Anomeric Position

[chemical structure]

[0963] Compound 133 can be conjugated to an oligonucleotide of any sequence. In the final product, compound 134, n is 1, 2, 3, 4, 5, or 6. Alternatively, compound 137 below can be conjugated to the 5′-end of an oligonucleotide of any sequence using an automated oligonucleotide synthesizer, resulting in a variety of oligonucleotides represented by compound 138 below.

[chemical structure]

### Example 23: Synthesis of Oligonucleotides Comprising Three GalNAc Moieties Modified to Comprise a Triazole at the C6 Positions

[chemical structure]

[chemical structure]

[0965] Compound 139 (5 g, 8.7 mmol) was dissolved in 7 N NH₃ in MeOH (30 mL) in a sealed 150 mL round-bottom flask and stirred at room temperature for 12 h. The clear solution became a thick white suspension. The reaction mixture was concentrated to dryness to yield a white solid, compound 140 (quantitative yield). Structure was confirmed by LCMS, ¹H NMR and ¹³C NMR analysis.

[0966] Compound 140 (3.9 g, 8.5 mmol), p-Toluenesulfonic acid monohydrate (0.15 g, 0.79 mmol) and 2,2-Dimethoxypropane (15 mL, 121.8 mmol) were suspended in DMF (20 mL) and stirred at room temperature for 12 h. 50% aqueous acetic acid (10 mL) was added and stirring continued for additional h. Solvent was removed under reduced pressure, and the residue was dissolved in 10% MeOH in DCM (200 mL) and washed with aqueous saturated NaHCO₃ solution and brine, dried (Na₂SO₄), filtered and concentrated. The residue was purified by silica gel column chromatography and eluted first with 50% ethyl acetate in DCM (5 CV), then with 100% ethyl acetate (10 CV) to yield compound 141 (1.83 g, 43.5%). Structure was confirmed by LCMS, ¹H NMR and ¹³C NMR analysis.

[0967] To a solution of compound 141 (4.1 g, 8.3 mmol) in dichloromethane (50 mL), triethylamine (3.5 mL, 18.3 mmol) was added and the reaction mixture was cooled in an ice bath. To this, a solution of p-toulenesulfonyl chloride (3.5 g, 18.3 mmol) in dichloromethane ion (30 mL) was added. The reaction mixture was allowed to come to room temperature and stirred for 72 h. The reaction was diluted with dichloromethane and washed with aqueous saturated NaHCO₃ solution and brine, dried (Na₂SO₄), filtered and concentrated to yield compound 142 (6.82 g). The structure was confirmed by LCMS, ¹H NMR and ¹³C NMR analysis.

[0968] To a solution of compound 142 (5.4 g, 8.3 mmol) in DMSO (40 mL) NaN₃ (6.8 g, 105 mmol) and water (6 mL) were added and the solution was heated at 100° C. for 25 h. The reaction mixture was diluted with ethyl acetate and with aqueous saturated NaHCO₃ solution and brine, dried (Na₂SO₄), filtered and concentrated. The residue obtained was purified silica gel column chromatography and eluted with 10-40% acetone in dichloromethane to yield compound 143 (3.35 g, 77.6%). Structure was confirmed by LCMS, ¹H NMR and ¹³C NMR analysis.

[0969] To a solution of 3-ethynylanisole (0.88 mL, 6.9 mmol) and compound 143 (3 g, 5.8 mmol) in MeOH (20 mL), TBTA (tris[(1-benzyl-1H-1,2,3-triazol-4-yl)methyl]amine (0.15 g, 0.29 mmol), CuSO4.5H2O (0.014 g, 0.058 mmol) in water (2 mL, reaction became blue solution), and (+)-Sodium L-ascorbate (0.11 g, 0.58 mmol) in water (1 ml, reaction color changed to yellow) were added. The reaction was vigorously stirred for 12 h at room temperature, and concentrated to dryness. The residue was the dissolved in dichloromethane (100 mL) and washed with water (50 mL×3). The organic phase was separated and the aqueous phase was further extracted with (2×10 mL). The combined organic fractions were concentrated and the residue was purified by Biotage silica gel (100 g) chromatography that eluted with 15% (6CV), 20% (6CV), 25% (6CV) and 30% (6CV) acetone in dichloromethane to yield compound 144 (3.6 g, 95.7%). Structure was confirmed by LCMS, ¹H NMR and ¹³C NMR analysis.

[0970] Compound 144 (3.35 g, 5.14 mmol) was dissolved in acetonitrile (57 mL) and aqueous H₂SO₄ (1.84%, 43 mL) was added. The mixture was stirred at room temperature for 96 h. The reaction mixture was extracted with ethyl acetate and washed with aqueous saturated NaHCO₃ and brine. The organic phase was concentrated to dryness and the crude product was purified through silica gel column and eluted with 2-10% MeOH in dichloromethane to yield compound 145 (2.92 g, 93%). Structure was confirmed by LCMS, ¹H NMR and ¹³C NMR analysis.

[0971] Compound 145 (1.78 g, 2.9 mmol) was dissolved in anhydrous pyridine (45 mL) and to this acetic anhydride (2.75 mL, 29 mmol) was added. The reaction mixture was stirred at room temperature for 12 h and then at 50° C. for 3 h. The reaction mixture was extracted with dichloromethane (150 mL) and the dichloromethane phase was washed with aqueous saturated sodium solution (100 mL), brine (100 mL), 2N HCl (100 mL) and brine (100 mL). The organic phase was dried over Na₂SO₄, filtered and concentrated to dryness. The residue was purified by silica gel column chromatography and eluted with 1-5% MeOH in dichloromethane to yield compound 146 (1.96 g, 96.8%). Structure was confirmed by LCMS, ¹H NMR and ¹³C NMR analysis.

[0972] Compound 146 (1.62 g, 2.31 mmol) and compound 112 (0.8 g, 0.77 mmol) were dissolved in THF (16 mL). To this mixture, Pd(OH)₂ (0.28 g) was added. The reaction mixture was stirred at room temperature for 3 h. The suspension was filtered through a pad of Celite and washed with THF. The organic phase were combined and concentrated to dryness under reduced pressure. The residue was purified by silica gel chromatography and eluted with 5-20% MeOH in dichloromethane to yield tri-antinary cluster acid (1.12 g, 70%). The cluster acid (1 g, 0.48 mmol) and TEA (0.2 mL, 1.44 mmol) were dissolved in dichloromethane (10 mL) and PFP-TFA (0.16 mL, 0.96 mmol) was added. After two h, the reaction mixture was diluted with dichloromethane and washed with 1N NaHSO₄ (30 mL×2), brine (30 mL); aqueous saturated sodium bicarbonate (30 mL×2), and brine (30 mL). The resulting solution was dried over Na₂SO₄, filtered and concentrated to dryness under reduced pressure to yield compound 147 (1.05 g, 97%). Structure was confirmed by LCMS, ¹H NMR and ¹³C NMR analysis.

[0973] Compound 147 can be conjugated to an oligonucleotide of any sequence, resulting in a variety of oligonucleotides represented by compound 148, wherein n=1, 2, 3, 4, 5, or 6.

### Example 24: Synthesis of Oligonucleotides Comprising a GalNAc Modified to Comprise a Triazole at the C6 Position

[chemical structure]

[chemical structure]

[0975] Compounds 152a and 152b can be conjugated to an oligonucleotide of any sequence, resulting in a variety of oligonucleotides represented by compounds 153a and 153b, wherein n=1, 2, 3, 4, 5, or 6. Alternatively, compound 154 below can be conjugated to the 5′-end of an oligonucleotide of any sequence using an automated oligonucleotide synthesizer, resulting in a variety of oligonucleotides represented by compound 155 below.

[chemical structure]

### Example 25: Synthesis of Oligonucleotides Comprising a GalNAc Modified to Comprise an Amide at the C6 Position

[chemical structure]

[chemical structure]

[0977] Compound 162 can be conjugated to the 5′-end of an oligonucleotide of any sequence using an automated oligonucleotide synthesizer, resulting in a variety of oligonucleotides.

### Example 26: Synthesis of Oligonucleotides Comprising a GalNAc Modified to Comprise an Indole Moiety at the C6 Position

[chemical structure]

[chemical structure]

[0979] Compound 169 can be conjugated to the 5′-end of an oligonucleotide of any sequence using an automated oligonucleotide synthesizer, resulting in a variety of oligonucleotides.

### Example 27: Synthesis of Oligonucleotides Comprising a GalNAc Modified to Comprise an Azide at the C6 Position

[chemical structure]

[0981] Compound 172 can be conjugated to the 5′-end of an oligonucleotide of any sequence using an automated oligonucleotide synthesizer, resulting in a variety of oligonucleotides.

### Example 28: Synthesis of Oligonucleotides Comprising a GalNAc Modified to Comprise a Triazole at the C6 Position

[chemical structure]

[0983] Compound 178 can be conjugated to an oligonucleotide of any sequence, resulting in a variety of oligonucleotides. Alternatively, compound 179 below can be conjugated to the 5′-end of an oligonucleotide of any sequence using an automated oligonucleotide synthesizer, resulting in a variety of oligonucleotides.

[chemical structure]

### Example 29: Synthesis of Oligonucleotides Comprising a GalNAc Modified to Comprise an Amide at the C6 Position

[chemical structure]

[chemical structure]

[0985] Using the method shown in the scheme above, a variety of GalNAc moieties modified to comprise an amide at the C6 position can be prepared, represented by compound 184. Phosphoramidite 184 can be conjugated to the 5′-end of an oligonucleotide of any sequence using an automated oligonucleotide synthesizer, resulting in a variety of oligonucleotides. Alternatively, the pentafluorophenyl ester of compound 183 can be synthesized and conjugated to an oligonucleotide of any sequence, resulting in a variety of oligonucleotides.

### Example 30: Synthesis of Oligonucleotides Comprising Three GalNAc Moieties Modified to Comprise an Amide at the C6 Position

[chemical structure]

[chemical structure]

[0987] Using the method shown in the scheme above, a variety of trivalent GalNAc moieties modified to comprise an amide at the C6 position can be prepared, represented by compound 186. Compound 186 can be conjugated to an oligonucleotide of any sequence, resulting in a variety of oligonucleotides, wherein n=1, 2, 3, 4, 5, or 6.

### Example 31: Synthesis of Oligonucleotides Comprising a GalNAc Modified to Comprise a Triazole at the C2 Position

[chemical structure]

[0989] Using the method shown in the scheme above, a variety of GalNAc moieties modified to comprise a triazole at the C2 position can be prepared, represented by compound 192. Phosphoramidite 192 can be conjugated to the 5′-end of an oligonucleotide of any sequence using an automated oligonucleotide synthesizer, resulting in a variety of oligonucleotides. Alternatively, the pentafluorophenyl ester of deprotected compound 191 can be synthesized and conjugated to an oligonucleotide of any sequence, resulting in a variety of oligonucleotides.

### Example 32: Dose-Dependent Antisense Inhibition of Human ApoC III in huApoC III Transgenic Mice

[0990] ISIS 304801 and ISIS 647535, each targeting human ApoC III and described above, were separately tested and evaluated in a dose-dependent study for their ability to inhibit human ApoC III in human ApoC III transgenic mice.

### Treatment

[0991] Human ApoCIII transgenic mice were maintained on a 12-hour light/dark cycle and fed ad libitum Teklad lab chow. Animals were acclimated for at least 7 days in the research facility before initiation of the experiment. ASOs were prepared in PBS and sterilized by filtering through a 0.2 micron filter. ASOs were dissolved in 0.9% PBS for injection.

[0992] Human ApoC III transgenic mice were injected intraperitoneally once a week for two weeks with ISIS 304801 or 647535 at 0.08, 0.25. 0.75, 2.25 or 6.75 μmol/kg or with PBS as a control. Each treatment group consisted of 4 animals. Forty-eight hours after the administration of the last dose, blood was drawn from each mouse and the mice were sacrificed and tissues were collected.

ApoC III mRNA Analysis

[0993] ApoC III mRNA levels in the mice's livers were determined using real-time PCR and RIBOGREEN® RNA quantification reagent (Molecular Probes, Inc. Eugene, Oreg.) according to standard protocols. ApoC III mRNA levels were determined relative to total RNA (using Ribogreen), prior to normalization to PBS-treated control. The results below are presented as the average percent of ApoC III mRNA levels for each treatment group, normalized to PBS-treated control and are denoted as “% PBS”. The half maximal effective dosage (ED₅₀) of each ASO is also presented in Table 26, below.

[0994] As illustrated, both antisense compounds reduced ApoC III RNA relative to the PBS control. Further, the antisense compound conjugated to GalNAc₃-1 (ISIS 647535) was substantially more potent than the antisense compound lacking the GalNAc₃-1 conjugate (ISIS 304801).

TABLE 26
Effect of ASO treatment on ApoC III mRNA
levels in human ApoC III transgenic mice

| | | | | | Internu- | |
|---|---|---|---|---|---|---|
| | | | ED₅₀ | | cleoside | |
| | Dose | % | (μmol/ | 3′ | linkage/ | SEQ |
| ASO | (μmol/kg) | PBS | kg) | Conjugate | Length | ID No. |
| PBS | 0 | 100 | — | — | — | |
| ISIS | 0.08 | 95 | 0.77 | None | PS/20 | 32 |
| 304801 | 0.75 | 42 | | | | |
| | 2.25 | 32 | | | | |
| | 6.75 | 19 | | | | |
| ISIS | 0.08 | 50 | 0.074 | GalNAc₃-1 | PS/20 | 111 |
| 647535 | 0.75 | 15 | | | | |
| | 2.25 | 17 | | | | |
| | 6.75 | 8 | | | | |

### ApoC III Protein Analysis (Turbidometric Assay)

[0995] Plasma ApoC III protein analysis was determined using procedures reported by Graham et al, Circulation Research, published online before print Mar. 29, 2013.

[0996] Approximately 100 μl of plasma isolated from mice was analyzed without dilution using an Olympus Clinical Analyzer and a commercially available turbidometric ApoC III assay (Kamiya, Cat# KAI-006, Kamiya Biomedical, Seattle, Wash.). The assay protocol was performed as described by the vendor.

[0997] As shown in the Table 27 below, both antisense compounds reduced ApoC III protein relative to the PBS control. Further, the antisense compound conjugated to GalNAc₃-1 (ISIS 647535) was substantially more potent than the antisense compound lacking the GalNAc₃-1 conjugate (ISIS 304801).

TABLE 27
Effect of ASO treatment on ApoC III plasma protein
levels in human ApoC III transgenic mice

| | | | | | Internu- | |
|---|---|---|---|---|---|---|
| | | | ED₅₀ | | cleoside | |
| | Dose | % | (μmol/ | 3′ | Linkage/ | SEQ |
| ASO | (μmol/kg) | PBS | kg) | Conjugate | Length | ID No. |
| PBS | 0 | 100 | — | — | — | |
| ISIS | 0.08 | 86 | 0.73 | None | PS/20 | 32 |
| 304801 | 0.75 | 51 | | | | |
| | 2.25 | 23 | | | | |
| | 6.75 | 13 | | | | |
| ISIS | 0.08 | 72 | 0.19 | GalNAc₃-1 | PS/20 | 111 |
| 647535 | 0.75 | 14 | | | | |
| | 2.25 | 12 | | | | |
| | 6.75 | 11 | | | | |

[0998] Plasma triglycerides and cholesterol were extracted by the method of Bligh and Dyer (Bligh, E. G. and Dyer, W. J. Can. J. Biochem. Physiol. 37: 911-917, 1959)(Bligh, E and Dyer, W, Can J Biochem Physiol, 37, 911-917, 1959)(Bligh, E and Dyer, W, Can J Biochem Physiol, 37, 911-917, 1959) and measured by using a Beckmann Coulter clinical analyzer and commercially available reagents.

[0999] The triglyceride levels were measured relative to PBS injected mice and are denoted as “% PBS”. Results are presented in Table 28. As illustrated, both antisense compounds lowered triglyceride levels. Further, the antisense compound conjugated to GalNAc₃-1 (ISIS 647535) was substantially more potent than the antisense compound lacking the GalNAc₃-1 conjugate (ISIS 304801).

TABLE 28
Effect of ASO treatment on triglyceride levels in transgenic mice

| | | | | | Internu- | |
|---|---|---|---|---|---|---|
| | | | ED₅₀ | | cleoside | |
| | Dose | % | (μmol/ | 3′ | Linkage/ | SEQ |
| ASO | (μmol/kg) | PBS | kg) | Conjugate | Length | ID No. |
| PBS | 0 | 100 | — | — | — | |
| ISIS | 0.08 | 87 | 0.63 | None | PS/20 | 32 |
| 304801 | 0.75 | 46 | | | | |
| | 2.25 | 21 | | | | |
| | 6.75 | 12 | | | | |
| ISIS | 0.08 | 65 | 0.13 | GalNAc₃-1 | PS/20 | 111 |
| 647535 | 0.75 | 9 | | | | |
| | 2.25 | 8 | | | | |
| | 6.75 | 9 | | | | |

[1000] Plasma samples were analyzed by HPLC to determine the amount of total cholesterol and of different fractions of cholesterol (HDL and LDL). Results are presented in Tables 29 and 30. As illustrated, both antisense compounds lowered total cholesterol levels; both lowered LDL; and both raised HDL. Further, the antisense compound conjugated to GalNAc₃-1 (ISIS 647535) was substantially more potent than the antisense compound lacking the GalNAc₃-1 conjugate (ISIS 304801). An increase in HDL and a decrease in LDL levels is a cardiovascular beneficial effect of antisense inhibition of ApoC III.

TABLE 29
Effect of ASO treatment on total cholesterol
levels in transgenic mice

| | | | | Internu- | |
|---|---|---|---|---|---|
| | | Total | | cleoside | |
| | Dose | Cholesterol | 3′ | Linkage/ | SEQ |
| ASO | (μmol/kg) | (mg/dL) | Conjugate | Length | ID No. |
| PBS | 0 | 257 | — | — | |
| ISIS | 0.08 | 226 | None | PS/20 | 32 |
| 304801 | 0.75 | 164 | | | |
| | 2.25 | 110 | | | |
| | 6.75 | 82 | | | |
| ISIS | 0.08 | 230 | GalNAc₃-1 | PS/20 | 111 |
| 647535 | 0.75 | 82 | | | |
| | 2.25 | 86 | | | |
| | 6.75 | 99 | | | |

TABLE 30
Effect of ASO treatment on HDL and LDL
cholesterol levels in transgenic mice

| | | | | | Internu- | |
|---|---|---|---|---|---|---|
| | | | LDL | | cleoside | |
| | Dose | HDL | (mg/ | 3′ | Linkage/ | SEQ |
| ASO | (μmol/kg) | (mg/dL) | dL) | Conjugate | Length | ID No. |
| PBS | 0 | 17 | 28 | — | — | |
| ISIS | 0.08 | 17 | 23 | None | PS/20 | 32 |
| 304801 | 0.75 | 27 | 12 | | | |
| | 2.25 | 50 | 4 | | | |
| | 6.75 | 45 | 2 | | | |
| ISIS | 0.08 | 21 | 21 | GalNAc₃-1 | PS/20 | 111 |
| 647535 | 0.75 | 44 | 2 | | | |
| | 2.25 | 50 | 2 | | | |
| | 6.75 | 58 | 2 | | | |

### Pharmacokinetics Analysis (PK)

[1001] The PK of the ASOs was also evaluated. Liver and kidney samples were minced and extracted using standard protocols. Samples were analyzed on MSD1 utilizing IP-HPLC-MS. The tissue level (μg/g) of full-length ISIS 304801 and 647535 was measured and the results are provided in Table 31. As illustrated, liver concentrations of total full-length antisense compounds were similar for the two antisense compounds. Thus, even though the GalNAc₃-1 conjugated antisense compound is more active in the liver (as demonstrated by the RNA and protein data above), it is not present at substantially higher concentration in the liver. Indeed, the calculated EC₅₀ (provided in Table 31) confirms that the observed increase in potency of the conjugated compound cannot be entirely attributed to increased accumulation. This result suggests that the conjugate improved potency by a mechanism other than liver accumulation alone, possibly by improving the productive uptake of the antisense compound into cells.

[1002] The results also show that the concentration of GalNAc₃-1 conjugated antisense compound in the kidney is lower than that of antisense compound lacking the GalNAc conjugate. This has several beneficial therapeutic implications. For therapeutic indications where activity in the kidney is not sought, exposure to kidney risks kidney toxicity without corresponding benefit. Moreover, high concentration in kidney typically results in loss of compound to the urine resulting in faster clearance. Accordingly, for non-kidney targets, kidney accumulation is undesired. These data suggest that GalNAc₃-1 conjugation reduces kidney accumulation.

TABLE 31
PK analysis of ASO treatment in transgenic mice

| | Dose | Liver | Kidney | Liver EC₅₀ | 3′ | Internucleoside | SEQ |
|---|---|---|---|---|---|---|---|
| ASO | (μmol/kg) | (μg/g) | (μg/g) | (μg/g) | Conjugate | Linkage/Length | ID No. |
| ISIS | 0.1 | 5.2 | 2.1 | 53 | None | PS/20 | 32 |
| 304801 | 0.8 | 62.8 | 119.6 | | | | |
| | 2.3 | 142.3 | 191.5 | | | | |
| | 6.8 | 202.3 | 337.7 | | | | |
| ISIS | 0.1 | 3.8 | 0.7 | 3.8 | GalNAc₃-1 | PS/20 | 111 |
| 647535 | 0.8 | 72.7 | 34.3 | | | | |
| | 2.3 | 106.8 | 111.4 | | | | |
| | 6.8 | 237.2 | 179.3 | | | | |

[1003] Metabolites of ISIS 647535 were also identified and their masses were confirmed by high resolution mass spectrometry analysis. The cleavage sites and structures of the observed metabolites are shown below. The relative % of full length ASO was calculated using standard procedures and the results are presented in Table 32. The major metabolite of ISIS 647535 was full-length ASO lacking the entire conjugate (i.e. ISIS 304801), which results from cleavage at cleavage site A, shown below. Further, additional metabolites resulting from other cleavage sites were also observed. These results suggest that introducing other cleabable bonds such as esters, peptides, disulfides, phosphoramidates or acyl-hydrazones between the GalNAc₃-1 sugar and the ASO, which can be cleaved by enzymes inside the cell, or which may cleave in the reductive environment of the cytosol, or which are labile to the acidic pH inside endosomes and lyzosomes, can also be useful.

TABLE 32
Observed full length metabolites of ISIS 647535

| Metabolite | ASO | Cleavage site | Relative % |
|---|---|---|---|
| 1 | ISIS 304801 | A | 36.1 |
| 2 | ISIS 304801 + dA | B | 10.5 |
| 3 | ISIS 647535 minus [3 GalNAc] | C | 16.1 |
| 4 | ISIS 647535 minus | D | 17.6 |
| | [3 GalNAc + 1 5-hydroxy-pentanoic acid tether] | | |
| 5 | ISIS 647535 minus | D | 9.9 |
| | [2 GalNAc + 2 5-hydroxy-pentanoic acid tether] | | |
| 6 | ISIS 647535 minus | D | 9.8 |
| | [3 GalNAc + 3 5-hydroxy-pentanoic acid tether] | | |

Cleavage Sites

[chemical structure]

[chemical structure]

[chemical structure]

[chemical structure]

[chemical structure]

[chemical structure]

[chemical structure]

[chemical structure]

### Example 33: Dose-Dependent Study of Phosphodiester Linked GalNAc₃-7ₐ, β-Thio-GalNAc₃-7ₐ and MP-Triazole-GalNAc₃-7ₐ at the 5′ Terminus Targeting SRB-1 In Vivo

[1004] The conjugated oligonucleotides listed below were tested in a dose-dependent study for antisense inhibition of SRB-1 in mice. The unconjugated parent oligonucleotide ISIS 353382 was included in the study for comparison. The study compared the effect of GalNAc₃-7ₐ and two sugar modified GalNAc₃-7ₐ conjugate groups (β-thio-GalNAc₃-7ₐ, also referred to herein as GalNAc₃-35ₐ, structure shown in compound 115, wherein n=6 in Example 19; and MP-Triazole-GalNAc₃-7ₐ, also referred to herein as GalNAc₃-33ₐ structure shown in compound 148, wherein n=6, in Example 23) wherein each of the sugar modified oligonucleotides were tested with and without a deoxyadenosine (A_{d}) cleavable moiety.

| ISIS #/Seq | |
|---|---|
| Id No. | Sequence 5′-3′ |
| 353382/147 | Gₑₛ^{m}CₑₛTₑₛTₑₛ^{m}CₑₛA_{ds}G_{ds}T_{ds}^{m}C_{ds}A_{ds}T_{ds}G_{ds}A_{ds}^{m}C_{ds}T_{ds}Tₑₛ^{m}Cₑₛ^{m}CₑₛTₑₛTₑ |
| 666981/141 | GalNAc3-7a_{o′}A_{do}Gₑₛ^{m}CₑₛTₑₛTₑₛ^{m}CₑₛA_{ds}G_{ds}T_{ds}^{m}C_{ds}A_{ds}T_{ds}G_{ds}A_{ds}^{m}C_{ds} |
| | T_{ds}Tₑₛ^{m}Cₑₛ^{m}CₑₛTₑₛTₑ |
| 709049/141 | β-thio-GalNAc₃-7ₐ_{o′}A_{do}Gₑₛ^{m}CₑₛTₑₛTₑₛ^{m}CₑₛA_{ds}G_{ds}T_{ds}^{m}C_{ds}A_{ds}T_{ds}G_{ds}A_{ds}^{m}C_{ds} |
| | T_{ds}Tₑₛ^{m}Cₑₛ^{m}CₑₛTₑₛTe |
| 720810/147 | β-thio-GalNAc₃-7ₐ_{o′}Gₑₛ^{m}CₑₛTₑₛTₑₛ^{m}CₑₛA_{ds}G_{ds}T_{ds}^{m}C_{ds}A_{ds}T_{ds}G_{ds}A_{ds}^{m}C_{ds}T_{ds}Tₑₛ^{m}Cₑₛ^{m}Cₑₛ |
| | TₑₛTₑ |
| 721455/141 | C6-MP-Triazole-GalNAc₃-7ₐ_{o′}A_{do}Gₑₛ^{m}CₑₛTₑₛTₑₛ^{m}CₑₛA_{ds}G_{ds}T_{ds}^{m}C_{ds}A_{ds}T_{ds}G_{ds}A_{ds} |
| | ^{m}C_{ds}T_{ds}Tₑₛ^{m}cₑₛ^{m}CₑₛTₑₛTₑ |
| 721456/147 | C6-MP-Triazole-GalNAc₃-7ₐ_{o′}Gₑₛ^{m}CₑₛTₑₛTₑₛ^{m}CₑₛA_{ds}G_{ds}T_{ds}^{m}C_{ds}A_{ds}T_{ds}G_{ds}A_{ds} |
| | ^{m}C_{ds}T_{ds}Tₑₛ^{m}cₑₛ^{m}CₑₛTₑₛTₑ |

[1005] Capital letters indicate the nucleobase for each nucleoside and ^{m}C indicates a 5-methyl cytosine. Subscripts: “e” indicates a 2′-O—(CH₂)₃—OCH₃ (MOE) modified nucleoside; “d” indicates a β-D-2′-deoxyribonucleoside; “s” indicates a phosphorothioate internucleoside linkage (PS); “o” indicates a phosphodiester internucleoside linkage (PO); and “o′” indicates —O—P(═O)(OH)—. Conjugate groups are underlined.

### Treatment

[1006] Six week old male Balb/c mice (Jackson Laboratory, Bar Harbor, Me.) were injected subcutaneously once at the dosage shown below with ISIS 353382, 666981, 709049, 720810, 721455, 721456 or with PBS treated control. Each treatment group consisted of 4 animals. The mice were sacrificed 72 hours following administration to determine the liver SRB-1 mRNA levels using real-time PCR and RIBOGREEN® RNA quantification reagent (Molecular Probes, Inc. Eugene, Oreg.) according to standard protocols. SRB-1 mRNA levels were determined relative to total RNA (using Ribogreen), prior to normalization to PBS-treated control. The results below are presented as the average percent of SRB-1 mRNA levels for each treatment group, normalized to PBS-treated control and is denoted as “% PBS”. The ED₅₀s were measured using similar methods as described previously and are presented below. The ED₅₀s listed in Table 33 below were calculated by plotting the concentrations of oligonucleotides used versus the percent inhibition of SRB-1 mRNA expression achieved at each concentration, and noting the concentration of oligonucleotide at which 50% inhibition of SRB-1 mRNA expression was achieved compared to the control.

TABLE 33
ASOs containing GalNAc₃-7 w/wo
modified sugars targeting SRB-1

| ISIS | Dosage | SRB-1 mRNA | ED₅₀ | | SEQ ID |
|---|---|---|---|---|---|
| No. | (mg/kg) | levels (% PBS) | mg/kg | 5′-Conjugate | No. |
| PBS | 0 | 100 | — | — | — |
| 353382 | 3 | 107 | 27.2 | No conjugate | 147 |
| | 10 | 80 | | | |
| | 30 | 48 | | | |
| 666981 | 0.5 | 99 | 3.4 | GalNAc₃-7a with | 141 |
| | 1.5 | 71 | | dA | |
| | 5 | 35 | | | |
| | 15 | 21 | | | |
| 709049 | 0.5 | 87 | 3.1 | β-thio GalNAc₃- | 141 |
| | 1.5 | 66 | | 7a with dA | |
| | 5 | 38 | | | |
| | 15 | 18 | | | |
| 720810 | 0.5 | 80 | 3.3 | β-thio GalNAc₃- | 147 |
| | 1.5 | 66 | | 7a without dA | |
| | 5 | 43 | | | |
| | 15 | 19 | | | |
| 721455 | 0.5 | 90 | 4.7 | MP-Triazole | 141 |
| | 1.5 | 72 | | GalNAc₃-7a | |
| | 5 | 47 | | with dA | |
| | 15 | 29 | | | |
| 721456 | 0.5 | 85 | 3.7 | MP-Triazole | 147 |
| | 1.5 | 64 | | GalNAc₃-7a | |
| | 5 | 44 | | without dA | |
| | 15 | 27 | | | |

[1007] As illustrated in Table 33, treatment with antisense oligonucleotides lowered SRB-1 mRNA levels in a dose-dependent manner. Indeed, the antisense oligonucleotides comprising the phosphodiester linked conjugate groups showed substantial improvement in potency compared to the unconjugated antisense oligonucleotide (ISIS 353382).

[1008] The results of the body weights, liver transaminases, total bilirubin, and BUN measurements were all essentially unaffected by the oligonucleotides tested, indicating that the oligonucleotides were well tolerated.

### Example 34: Dose-Dependent Study of 5′ Phosphodiester Linked GalNAc₃-7ₐ, GalNAc₁-25ₐ, GalNAc₁-34ₐ, and α-Thio-GalNAc₃-7 Targeting SRB-1 In Vivo

[1009] The conjugated oligonucleotides listed below were tested in a dose-dependent study for antisense inhibition of SRB-1 in mice. The unconjugated parent oligonucleotide ISIS 353382 was included in the study for comparison. The study included a comparison of the effect of GalNAc₃-7ₐ (structure shown in Example 2), GalNAc₁-25ₐ (structure shown in Example 11) and GalNAc₁-34ₐ (structure shown in compound 153a wherein n=6 in Example 24). These conjugate groups were attached directly to the parent antisense oligonucleotide without an A_{d} cleavable moiety. The study also included a comparison of the effect of GalNAc₃-7ₐ and α-thio-GalNAc₃-7ₐ (also referred to herein as GalNAc₃-36ₐ, structure shown in compound 120, wherein n=6, in Example 20). These conjugate groups were attached to the parent antisense oligonucleotide with an A_{d} cleavable moiety.

Modified ASOs targeting SRB-1

| ISIS #/Seq | |
|---|---|
| Id No. | Sequence 5′-3′ |
| 353382/142 | Gₑₛ^{m}CₑₛTₑₛTₑₛ^{m}CₑₛA_{ds}G_{ds}T_{ds}^{m}C_{ds}A_{ds}T_{ds}G_{ds}A_{ds}^{m}C_{ds}T_{ds}Tₑₛ^{m}Cₑₛ^{m}CₑₛTₑₛTₑ |
| 702489/142 | GalNAc₃-7ₐ_{o′}Gₑₛ^{m}CₑₛTₑₛTₑₛ^{m}CₑₛA_{ds}G_{ds}T_{ds}^{m}C_{ds}A_{ds}T_{ds}G_{ds}A_{ds}^{m}C_{ds}T_{ds}Tₑₛ^{m}Cₑₛ^{m}CₑₛTₑₛTₑ |
| 711462/142 | GalNAc₁-25ₐ_{o′}Gₑₛ^{m}CₑₛTₑₛTₑₛ^{m}CₑₛA_{ds}G_{ds}T_{ds}^{m}C_{ds}A_{ds}T_{ds}G_{ds}A_{ds}^{m}C_{ds}T_{ds}Tₑₛ^{m}Cₑₛ^{m}CₑₛTₑₛT |
| 727852/142 | GalNAc₁-34ₐ_{o′}Gₑₛ^{m}CₑₛTₑₛTₑₛ^{m}CₑₛA_{ds}G_{ds}T_{ds}^{m}C_{ds}A_{ds}T_{ds}G_{ds}A_{ds}^{m}C_{ds}T_{ds}Tₑₛ |
| | ^{m}Cₑₛ^{m}CₑₛTₑₛT |
| 666981/141 | GalNAc₃-7ₐ_{o′}A_{do}Gₑₛ^{m}CₑₛTₑₛTₑₛ^{m}CₑₛA_{ds}G_{ds}T_{ds}^{m}C_{ds}A_{ds}T_{ds}G_{ds}A_{ds}^{m}C_{ds}T_{ds}Tₑₛ^{m}Cₑₛ^{m}CₑₛTₑₛTₑ |
| 720333/141 | α-thio-GalNAc₃-7ₐ_{o′}A_{do}Gₑₛ^{m}CₑₛTₑₛTₑₛ^{m}CₑₛA_{ds}G_{ds}T_{ds}^{m}C_{ds}A_{ds}T_{ds}G_{ds}A_{ds}^{m}C_{ds}T_{ds}Tₑₛ^{m}Cₑₛ^{m}Cₑₛ |
| | TₑₛTₑ |

[1010] Capital letters indicate the nucleobase for each nucleoside and ^{m}C indicates a 5-methyl cytosine. Subscripts: “e” indicates a 2′-O—(CH₂)₃—OCH₃ (MOE) modified nucleoside; “d” indicates a 3-D-2′-deoxyribonucleoside; “s” indicates a phosphorothioate internucleoside linkage (PS); “o” indicates a phosphodiester internucleoside linkage (PO); and “o′” indicates —O—P(═O)(OH)—. Conjugate groups are underlined.

### Treatment

[1011] Six week old male Balb/c mice (Jackson Laboratory, Bar Harbor, Me.) were injected subcutaneously with the ASOs listed below twice a week for 3 weeks at the dosage shown or with PBS. Each treatment group consisted of 4 animals. The mice were sacrificed 72 hours following administration to determine the liver SRB-1 mRNA levels using real-time PCR and RIBOGREEN® RNA quantification reagent (Molecular Probes, Inc. Eugene, Oreg.) according to standard protocols. SRB-1 mRNA levels were determined relative to total RNA (using RIBOGREEN®), prior to normalization to PBS-treated control. The results below are presented as the average percent of SRB-1 mRNA levels for each treatment group. The data was normalized to PBS-treated control and is denoted as “% PBS”. The ED₅₀s listed in Table 34 were calculated by plotting the concentrations of oligonucleotides used versus the percent inhibition of SRB-1 mRNA expression achieved at each concentration, and noting the concentration of oligonucleotide at which 50% inhibition of SRB-1 mRNA expression was achieved compared to the control.

TABLE 34
ASOs containing mod/unmod
GalNAc₃-7ₐ/GalNAc₁-30ₐ targeting SRB-1

| ISIS | Dosage | SRB-1 mRNA | ED₅₀ | | SEQ ID |
|---|---|---|---|---|---|
| No. | (mg/kg) | levels (% PBS) | mg/kg | 5′-Conjugate | No. |
| PBS | 0 | 100 | — | — | — |
| 353382 | 3 | 72 | 20.7 | No conjugate | 147 |
| | 10 | 62 | | | |
| | 30 | 36 | | | |
| 666981 | 0.5 | 73 | 2.3 | GalNAc₃-7ₐ | 141 |
| | 1.5 | 55 | | with dA | |
| | 5 | 26 | | | |
| | 15 | 15 | | | |
| 720333 | 0.5 | 82 | 3.1 | α-thio | 141 |
| | 1.5 | 52 | | GalNAc₃-7ₐ | |
| | 5 | 31 | | with dA | |
| | 15 | 20 | | | |
| 702489 | 0.5 | 79 | 2.4 | GalNAc₃-7ₐ | 147 |
| | 1.5 | 65 | | without dA | |
| | 5 | 23 | | | |
| | 15 | 10 | | | |
| 711462 | 0.5 | 89 | 4.9 | GalNAc₁-25ₐ | 147 |
| | 1.5 | 75 | | without dA | |
| | 5 | 36 | | | |
| | 15 | 25 | | | |
| 727852 | 0.5 | 99 | 2.9 | GalNAc₁-34ₐ | 147 |
| | 1.5 | 70 | | without dA | |
| | 5 | 30 | | | |
| | 15 | 10 | | | |

[1012] As illustrated in Table 34, treatment with antisense oligonucleotides lowered SRB-1 mRNA levels in a dose-dependent manner. Indeed, the antisense oligonucleotides comprising the phosphodiester linked conjugate groups showed substantial improvement in potency compared to the unconjugated antisense oligonucleotide (ISIS 353382). It was unexpected that ISIS 727852 having a single modified GalNAc sugar provided equivalent activity compared to ISIS 702489 which comprises 3 unmodified GalNAc sugars.

[1013] The results of the body weights, liver transaminases, total bilirubin, and BUN measurements were all essentially unaffected by the oligonucleotides tested, indicating that the oligonucleotides were well tolerated.

### Example 35: Dose-Dependent Study of Modified ASOs Targeting APOC-III In Vivo

[1014] The compounds in the table below were designed to target mouse APOC-III.

TABLE 35
Modified ASOs targeting mouse APOC-III

| | | SEQ ID |
|---|---|---|
| Isis No. | Sequence | NO. |
| 440670 | ^{m}Cₑₛ Aₑₛ Gₑₛ ^{m}Cₑₛ Tₑₛ T_{ds} T_{ds} A_{ds} T_{ds} T_{ds} A_{ds} G_{ds} G_{ds} G_{ds} A_{ds} ^{m}Cₑₛ Aₑₛ Gₑₛ ^{m}Cₑₛ Aₑ | 148 |
| 680772 | Galnac₃-7ₐ₋ₒ′^{m}Cₑₛ Aₑₛ Gₑₛ ^{m}Cₑₛ Tₑₛ T_{ds} T_{ds} A_{ds} T_{ds} T_{ds} A_{ds} G_{ds} G_{ds} G_{ds} A_{ds} ^{m}Cₑₛ Aₑₛ | 148 |
| | Gₑₛ ^{m}Cₑₛ Aₑ | |
| 742119 | GalNAC₁-37ₐ₋ₒ′^{m}Cₑₛ Aₑₛ Gₑₛ ^{m}Cₑₛ Tₑₛ T_{ds} T_{ds} A_{ds} T_{ds} T_{ds} A_{ds} G_{ds} G_{ds} G_{ds} A_{ds} ^{m}Cₑₛ | 148 |
| | Aₑₛ Gₑₛ ^{m}Cₑₛ Aₑ | |
| 742117 | GalNAC₁-34ₐ₋ₒ′^{m}Cₑₛ Aₑₛ Gₑₛ ^{m}Cₑₛ Tₑₛ T_{ds} T_{ds} A_{ds} T_{ds} T_{ds} A_{ds} G_{ds} G_{ds} G_{ds} A_{ds} ^{m}Cₑₛ | 148 |
| | Aₑₛ Gₑₛ ^{m}Cₑₛ Aₑ | |
| 696846 | GalNAC₃-7ₐ₋ₒ′^{m}Cₑₛ Aₑₒ Gₑₒ ^{m}Cₑₒ Tₑₒ T_{ds} T_{ds} A_{ds} T_{ds} T_{ds} A_{ds} G_{ds} G_{ds} G_{ds} A_{ds} ^{m}Cₑₒ | 148 |
| | Aₑₒ Gₑₛ ^{m}Cₑₛ Aₑ | |
| 742120 | GalNAC₁-37ₐ₋ₒ′^{m}Cₑₛ Aₑₒ Gₑₒ ^{m}Cₑₒ Tₑₒ T_{ds} T_{ds} A_{ds} T_{ds} T_{ds} A_{ds} G_{ds} G_{ds} G_{ds} A_{ds} ^{m}Cₑₒ | 148 |
| | Aₑₒ Gₑₛ ^{m}Cₑₛ Aₑ | |
| 742121 | GalNAC₁-34ₐ₋ₒ′^{m}Cₑₛ Aₑₒ Gₑₒ ^{m}Cₑₒ Tₑₒ T_{ds} T_{ds} A_{ds} T_{ds} T_{ds} A_{ds} G_{ds} G_{ds} G_{ds} A_{ds} ^{m}Cₑₒ | 148 |
| | Aₑₒ Gₑₛ ^{m}Cₑₛ Aₑ | |

[1015] The structure of GalNAc₁-37ₐ is shown below:

[chemical structure]

[1016] C57/BL6 mice were injected subcutaneously once with the ASOs listed above at the dosage shown or with PBS. Each treatment group consisted of 4 animals. The mice were sacrificed 72 hours following administration to determine the liver APOC-III mRNA levels using real-time PCR and RIBOGREEN® RNA quantification reagent (Molecular Probes, Inc. Eugene, Oreg.) according to standard protocols. APOC-III mRNA levels were determined relative to total RNA (using RIBOGREEN®), prior to normalization to PBS-treated control. The results below are presented as the average percent of APOC-III mRNA levels for each treatment group. The data was normalized to PBS-treated control and is denoted as “% PBS”. ED₅₀'s were calculated using nonlinear regression. The results below illustrate that the ASOs comprising one, modified GalNAc sugar (GalNAc₁-34ₐ) were more potent than the ASOs comprising one, unmodified GalNAc sugar (GalNAc₁-37ₐ) and were nearly as potent as the ASOs comprising three, unmodified GalNAc sugars (GalNAc₃-7ₐ).

TABLE 36
Activity of modified ASOs targeting mouse APOC-III in vivo

| | | APOC-III | | | |
|---|---|---|---|---|---|
| | Dose | mRNA | ED₅₀ | Conjugate | SEQ ID |
| Isis No. | (mg/kg) | (% PBS) | (mg/kg) | group | NO. |
| 440670 | 2 | 86 | 25.5 | n/a | 148 |
| | 6 | 77 | | | |
| | 20 | 56 | | | |
| | 60 | 32 | | | |
| 680772 | 0.6 | 77 | 3.1 | GalNAc₃-7ₐ | 148 |
| | 2 | 64 | | | |
| | 6 | 32 | | | |
| | 20 | 19 | | | |
| 742119 | 0.6 | 89 | 5.3 | GalNAc₁-37ₐ | 148 |
| | 2 | 78 | | | |
| | 6 | 45 | | | |
| | 20 | 19 | | | |
| 742117 | 0.6 | 92 | 4.9 | GalNAc₁-34ₐ | 148 |
| | 2 | 72 | | | |
| | 6 | 35 | | | |
| | 20 | 30 | | | |
| 696846 | 0.6 | 77 | 1.3 | GalNAc₃-7ₐ | 148 |
| | 2 | 28 | | | |
| | 6 | 17 | | | |
| | 20 | 12 | | | |
| 742120 | 0.6 | 96 | 6.7 | GalNAc₁-37ₐ | 148 |
| | 2 | 86 | | | |
| | 6 | 52 | | | |
| | 20 | 19 | | | |
| 742121 | 0.6 | 88 | 3.4 | GalNAc₁-34ₐ | 148 |
| | 2 | 62 | | | |
| | 6 | 33 | | | |
| | 20 | 20 | | | |

### Example 36: Oligonucleotides Comprising at Least One Modified GalNAc

[1017] The following modified GalNAc sugars are conjugated to oligonucleotides. Each oligonucleotide comprises one, two, or three modified GalNAc sugars.

[chemical structure]

[chemical structure]

[chemical structure]

[chemical structure]

[chemical structure]

[chemical structure]

[chemical structure]

[chemical structure]

[chemical structure]

[chemical structure]

[chemical structure]

[chemical structure]

[chemical structure]

[chemical structure]

[chemical structure]

[chemical structure]

[1018] Certain modified GalNAc structures shown above are synthesized via the following scheme:

[chemical structure]

[chemical structure]

### Example 37: Dose-Dependent Study of Modified Oligonucleotides Targeting SRB1 In Vivo

[1019] The compounds in Table 37 were designed to target mouse SRB1. Wild type mice were injected subcutaneously once with a modified oligonucleotide listed in Table 37 at 0.2, 0.6, 2.0, or 6.0 mg/kg. A control group was injected subcutaneously with PBS. Each treatment group consisted of 2-4 animals. The mice were sacrificed 72 hours following oligonucleotide administration to determine the liver SRB1 mRNA levels using real-time PCR according to standard protocols. SRB1 mRNA levels were determined relative to total RNA (using RIBOGREEN®), prior to normalization to PBS treated control. The average percent of SRB1 mRNA levels for each treatment group relative to the average for the PBS treated group were used to calculate ED₅₀'s via nonlinear regression. The results below illustrate that the oligonucleotide comprising one, modified GalNAc sugar (GalNAc₁-34ₐ) was more potent than the oligonucleotide comprising one, unmodified GalNAc sugar (GalNAc₁-37ₐ).

TABLE 37
Activity of modified oligonucleotides
targeting mouse SRB1

| | | ED₅₀ | SEQ ID |
|---|---|---|---|
| Isis No. | Sequence | (mg/kg) | NO. |
| 780123 | GalNAc₁-37_{a-o′}Tₖₛ ^{m}Cₖₛ A_{ds} | 0.99 | 149 |
| | G_{ds} T_{ds} ^{m}C_{ds} A_{ds} T_{ds} G_{ds} | | |
| | A_{ds} ^{m}C_{ds} T_{ds} Tₖₛ ^{m}Cₖ | | |
| 780121 | GalNAc₁-34_{a-o′}Tₖₛ ^{m}Cₖₛ A_{ds} | 0.70 | 149 |
| | G_{ds} T_{ds} ^{m}C_{ds} A_{ds} T_{ds} G_{ds} | | |
| | A_{ds} ^{m}C_{ds} T_{ds} Tₖₛ ^{m}Cₖ | | |

[1020] The structures of GalNAc₁-34ₐ and GalNAc₁-37ₐ are described above.

### Example 38: Single Dose Study of Modified Oligonucleotides Targeting SRB1 In Vivo

[1021] The compounds in Table 38 were designed to target mouse SRB1. Wild type mice were injected subcutaneously once with a modified oligonucleotide listed in Table 38 at 4.5 mg/kg. A control group was injected subcutaneously with PBS. Each treatment group consisted of 2-4 animals. The mice were sacrificed 72 hours following oligonucleotide administration to determine the liver SRB1 mRNA levels using real-time PCR according to standard protocols. SRB1 mRNA levels were determined relative to total RNA (using RIBOGREEN®), prior to normalization to PBS treated control. The results below are presented as the average percent of SRB1 mRNA levels for each treatment group relative to the average for the PBS treated group. The results below illustrate that the oligonucleotides comprising various modified GalNAc sugars decreased target mRNA levels and several oligonucleotides comprising various modified GalNAc sugars were more potent than the oligonucleotide comprising an unmodified GalNAc sugar (GalNAc₁-37ₐ).

TABLE 38
Activity of modified oligonucleotides targeting mouse SRB1

| | | SRB1 mRNA | SEQ |
|---|---|---|---|
| Isis No. | Sequence | (% PBS) | ID NO. |
| 736690 | GalNAc₁-37_{a-o′}Gₑₛ^{m}CₑₛTₑₛTₑₛ^{m}CₑₛA_{ds}G_{ds}T_{ds}^{m}C_{ds}A_{ds}T_{ds}G_{ds}A_{ds}^{m}C_{ds}T_{ds}Tₑₛ | 41 | 147 |
| | ^{m}Cₑₛ^{m}CₑₛTₑₛTₑ | | |
| 727852 | GalNAc₁-34_{a-o′}Gₑₛ^{m}CₑₛTₑₛTₑₛ^{m}CₑₛA_{ds}G_{ds}T_{ds}^{m}C_{ds}A_{ds}T_{ds}G_{ds}A_{ds}^{m}C_{ds}T_{ds}Tₑₛ | 35 | 147 |
| | ^{m}Cₑₛ^{m}CₑₛTₑₛTₑ | | |
| 748826 | GalNAc₁-38_{a-o′}Gₑₛ^{m}CₑₛTₑₛTₑₛ^{m}CₑₛA_{ds}G_{ds}T_{ds}^{m}C_{ds}A_{ds}T_{ds}G_{ds}A_{ds}^{m}C_{ds}T_{ds}Tₑₛ | 35 | 147 |
| | ^{m}Cₑₛ^{m}CₑₛTₑₛTₑ | | |
| 748828 | GalNAc₁-39_{a-o′}Gₑₛ^{m}CₑₛTₑₛTₑₛ^{m}CₑₛA_{ds}G_{ds}T_{ds}^{m}C_{ds}A_{ds}T_{ds}G_{ds}A_{ds}^{m}C_{ds}T_{ds}Tₑₛ | 35 | 147 |
| | ^{m}Cₑₛ^{m}CₑₛTₑₛTₑ | | |
| 750494 | GalNAc₁-40_{a-o′}Gₑₛ^{m}CₑₛTₑₛTₑₛ^{m}CₑₛA_{ds}G_{ds}T_{ds}^{m}C_{ds}A_{ds}T_{ds}G_{ds}A_{ds}^{m}C_{ds}T_{ds}Tₑₛ | 43 | 147 |
| | ^{m}Cₑₛ^{m}CₑₛTₑₛTₑ | | |
| 750493 | GalNAc₁-41_{a-o′}Gₑₛ^{m}CₑₛTₑₛTₑₛ^{m}CₑₛA_{ds}G_{ds}T_{ds}^{m}C_{ds}A_{ds}T_{ds}G_{ds}A_{ds}^{m}C_{ds}T_{ds}Tₑₛ | 43 | 147 |
| | ^{m}Cₑₛ^{m}CₑₛTₑₛTₑ | | |
| 752377 | GalNAc₁-42_{a-o′}Gₑₛ^{m}CₑₛTₑₛTₑₛ^{m}CₑₛA_{ds}G_{ds}T_{ds}^{m}C_{ds}A_{ds}T_{ds}G_{ds}A_{ds}^{m}C_{ds}T_{ds}Tₑₛ | 38 | 147 |
| | ^{m}Cₑₛ^{m}CₑₛTₑₛTₑ | | |

[1022] The structures of GalNAc₁-34ₐ and GalNAc₁-37ₐ are described above. Compounds comprising GalNAc₁-38ₐ, GalNAc₁-39ₐ, GalNAc₁-40ₐ, GalNAc₁-41ₐ, and GalNAc₁-42ₐ were made using synthetic routes described herein, routes similar to those described herein, or reactions known in the art. The structures are shown below:

[chemical structure]

### Example 39: Single Dose Study of Modified Oligonucleotides Targeting SRB1 In Vivo

[1023] The compounds in Table 39 were designed to target mouse SRB1. Wild type mice were injected subcutaneously once with a modified oligonucleotide listed in Table 39 at 4.5 mg/kg. A control group was injected subcutaneously with PBS. Each treatment group consisted of 2-4 animals. The mice were sacrificed 72 hours following oligonucleotide administration to determine the liver SRB1 mRNA levels using real-time PCR according to standard protocols. SRB1 mRNA levels were determined relative to total RNA (using RIBOGREEN®), prior to normalization to PBS treated control. The results below are presented as the average percent of SRB1 mRNA levels for each treatment group relative to the average for the PBS treated group. The results below illustrate that the oligonucleotides comprising various modified GalNAc sugars decreased target mRNA levels.

TABLE 39
Activity of modified oligonucleotides targeting mouse SRB1

| | | SRB1 mRNA | SEQ |
|---|---|---|---|
| Isis No. | Sequence | (% PBS) | ID NO. |
| 801359 | GalNAc₁-43_{a-o′}Gₑₛ^{m}CₑₛTₑₛTₑₛ^{m}CₑₛA_{ds}G_{ds}T_{ds}^{m}C_{ds}A_{ds}T_{ds}G_{ds}A_{ds}^{m}C_{ds}T_{ds}Tₑₛ | 66 | 147 |
| | ^{m}Cₑₛ^{m}CₑₛTₑₛTₑ | | |
| 727852 | GalNAc₁-34_{a-o′}Gₑₛ^{m}CₑₛTₑₛTₑₛ^{m}CₑₛA_{ds}G_{ds}T_{ds}^{m}C_{ds}A_{ds}T_{ds}G_{ds}A_{ds}^{m}C_{ds}T_{ds}Tₑₛ | 53 | 147 |
| | ^{m}Cₑₛ^{m}CₑₛTₑₛTₑ | | |
| 801353 | GalNAc₁-44_{a-o′}Gₑₛ^{m}CₑₛTₑₛTₑₛ^{m}CₑₛA_{ds}G_{ds}T_{ds}^{m}C_{ds}A_{ds}T_{ds}G_{ds}A_{ds}^{m}C_{ds}T_{ds}Tₑₛ | 66 | 147 |
| | ^{m}Cₑₛ^{m}CₑₛTₑₛTₑ | | |
| 801360 | GalNAc₁-45_{a-o′}Gₑₛ^{m}CₑₛTₑₛTₑₛ^{m}CₑₛA_{ds}G_{ds}T_{ds}^{m}C_{ds}A_{ds}T_{ds}G_{ds}A_{ds}^{m}C_{ds}T_{ds}Tₑₛ | 67 | 147 |
| | ^{m}Cₑₛ^{m}CₑₛTₑₛTₑ | | |
| 801357 | GalNAc₁-46_{a-o′}Gₑₛ^{m}CₑₛTₑₛTₑₛ^{m}CₑₛA_{ds}G_{ds}T_{ds}^{m}C_{ds}A_{ds}T_{ds}G_{ds}A_{ds}^{m}C_{ds}T_{ds}Tₑₛ | 59 | 147 |
| | ^{m}Cₑₛ^{m}CₑₛTₑₛTₑ | | |
| 801358 | GalNAc₁-47_{a-o′}Gₑₛ^{m}CₑₛTₑₛTₑₛ^{m}CₑₛA_{ds}G_{ds}T_{ds}^{m}C_{ds}A_{ds}T_{ds}G_{ds}A_{ds}^{m}C_{ds}T_{ds}Tₑₛ | 54 | 147 |
| | ^{m}Cₑₛ^{m}CₑₛTₑₛTₑ | | |
| 801354 | GalNAc₁-48_{a-o′}Gₑₛ^{m}CₑₛTₑₛTₑₛ^{m}CₑₛA_{ds}G_{ds}T_{ds}^{m}C_{ds}A_{ds}T_{ds}G_{ds}A_{ds}^{m}C_{ds}T_{ds}Tₑₛ | 60 | 147 |
| | ^{m}Cₑₛ^{m}CₑₛTₑₛTₑ | | |

[1024] The structure of GalNAc₁-34ₐ is described above. Compounds comprising GalNAc₁-43ₐ, GalNAc₁-44ₐ, GalNAc₁-45ₐ, GalNAc₁-46ₐ, GalNAc₁-47ₐ, and GalNAc₁-48ₐ were made using synthetic routes described herein, routes similar to those described herein, or reactions known in the art. The structures are shown below:

[chemical structure]

### Example 40: Single Dose Study of Modified Oligonucleotides Targeting SRB1 In Vivo

[1025] The compounds in Table 40 were designed to target mouse SRB1. Wild type mice were injected subcutaneously once with a modified oligonucleotide listed in Table 40 at 4.5 mg/kg. A control group was injected subcutaneously with PBS. Each treatment group consisted of 2-4 animals. The mice were sacrificed 72 hours following oligonucleotide administration to determine the liver SRB1 mRNA levels using real-time PCR according to standard protocols. SRB1 mRNA levels were determined relative to total RNA (using RIBOGREEN®), prior to normalization to PBS treated control. The results below are presented as the average percent of SRB1 mRNA levels for each treatment group relative to the average for the PBS treated group. The results below illustrate that the oligonucleotides comprising various modified GalNAc sugars decreased target mRNA levels and several oligonucleotides comprising various modified GalNAc sugars were more potent than the oligonucleotide comprising an unmodified GalNAc sugar (GalNAc₁-37ₐ).

TABLE 40
Activity of modified oligonucleotides targeting mouse SRB1

| | | SRB1 mRNA | SEQ |
|---|---|---|---|
| Isis No. | Sequence | (% PBS) | ID NO. |
| 736690 | GalNAc₁-37_{a-o′}Gₑₛ^{m}CₑₛTₑₛTₑₛ^{m}CₑₛA_{ds}G_{ds}T_{ds}^{m}C_{ds}A_{ds}T_{ds}G_{ds}A_{ds}^{m}C_{ds}T_{ds}Tₑₛ | 55 | 147 |
| | ^{m}Cₑₛ^{m}CₑₛTₑₛTₑ | | |
| 727852 | GalNAc₁-34_{a-o′}Gₑₛ^{m}CₑₛTₑₛTₑₛ^{m}CₑₛA_{ds}G_{ds}T_{ds}^{m}C_{ds}A_{ds}T_{ds}G_{ds}A_{ds}^{m}C_{ds}T_{ds}Tₑₛ | 42 | 147 |
| | ^{m}Cₑₛ^{m}CₑₛTₑₛTₑ | | |
| 761852 | GalNAc₁-49_{a-o′}Gₑₛ^{m}CₑₛTₑₛTₑₛ^{m}CₑₛA_{ds}G_{ds}T_{ds}^{m}C_{ds}A_{ds}T_{ds}G_{ds}A_{ds}^{m}C_{ds}T_{ds}Tₑₛ | 57 | 147 |
| | ^{m}Cₑₛ^{m}CₑₛTₑₛTₑ | | |
| 761853 | GalNAc₁-50_{a-o′}Gₑₛ^{m}CₑₛTₑₛTₑₛ^{m}CₑₛA_{ds}G_{ds}T_{ds}^{m}C_{ds}A_{ds}T_{ds}G_{ds}A_{ds}^{m}C_{ds}T_{ds}Tₑₛ | 54 | 147 |
| | ^{m}Cₑₛ^{m}CₑₛTₑₛTₑ | | |
| 761854 | GalNAc₁-51_{a-o′}Gₑₛ^{m}CₑₛTₑₛTₑₛ^{m}CₑₛA_{ds}G_{ds}T_{ds}^{m}C_{ds}A_{ds}T_{ds}G_{ds}A_{ds}^{m}C_{ds}T_{ds}Tₑₛ | 52 | 147 |
| | ^{m}Cₑₛ^{m}CₑₛTₑₛTₑ | | |

[1026] The structures of GalNAc₁-34ₐ and GalNAc-37ₐ are described above. Compounds comprising GalNAc₁-49ₐ, GalNAc₁-50ₐ, and GalNAc₁-51ₐ were made using synthetic routes described herein, routes similar to those described herein, or reactions known in the art. The structures are shown below:

[chemical structure]

### Example 41: Single Dose Study of Modified Oligonucleotides Targeting SRB1 In Vivo

[1027] The compounds in Table 41 were designed to target mouse SRB1. Wild type mice were injected subcutaneously once with a modified oligonucleotide listed in Table 41 at 4.5 mg/kg. A control group was injected subcutaneously with PBS. Each treatment group consisted of 2-4 animals. The mice were sacrificed 72 hours following oligonucleotide administration to determine the liver SRB1 mRNA levels using real-time PCR according to standard protocols. SRB1 mRNA levels were determined relative to total RNA (using RIBOGREEN®), prior to normalization to PBS treated control. The results below are presented as the average percent of SRB1 mRNA levels for each treatment group relative to the average for the PBS treated group. The results below illustrate that the oligonucleotides comprising various modified GalNAc sugars decreased target mRNA levels and several oligonucleotides comprising various modified GalNAc sugars were more potent than the oligonucleotide comprising an unmodified GalNAc sugar (GalNAc₁-37ₐ).

TABLE 41
Activity of modified oligonucleotides targeting mouse SRB1

| | | SRB1 mRNA | SEQ |
|---|---|---|---|
| Isis No. | Sequence | (% PBS) | ID NO. |
| 736690 | GalNAc₁-37_{a-o′}Gₑₛ^{m}CₑₛTₑₛTₑₛ^{m}CₑₛA_{ds}G_{ds}T_{ds}^{m}C_{ds}A_{ds}T_{ds}G_{ds}A_{ds}^{m}C_{ds}T_{ds}Tₑₛ | 29 | 147 |
| | ^{m}Cₑₛ^{m}CₑₛTₑₛTₑ | | |
| 727852 | GalNAc₁-34_{a-o′}Gₑₛ^{m}CₑₛTₑₛTₑₛ^{m}CₑₛA_{ds}G_{ds}T_{ds}^{m}C_{ds}A_{ds}T_{ds}G_{ds}A_{ds}^{m}C_{ds}T_{ds}Tₑₛ | 23 | 147 |
| | ^{m}Cₑₛ^{m}CₑₛTₑₛTₑ | | |
| 790394 | GalNAc₁-52_{a-o′}Gₑₛ^{m}CₑₛTₑₛTₑₛ^{m}CₑₛA_{ds}G_{ds}T_{ds}^{m}C_{ds}A_{ds}T_{ds}G_{ds}A_{ds}^{m}C_{ds}T_{ds}Tₑₛ | 33 | 147 |
| | ^{m}Cₑₛ^{m}CₑₛTₑₛTₑ | | |
| 790437 | GalNAc₁-53_{a-o′}Gₑₛ^{m}CₑₛTₑₛTₑₛ^{m}CₑₛA_{ds}G_{ds}T_{ds}^{m}C_{ds}A_{ds}T_{ds}G_{ds}A_{ds}^{m}C_{ds}T_{ds}Tₑₛ | 29 | 147 |
| | ^{m}Cₑₛ^{m}CₑₛTₑₛTₑ | | |
| 789773 | GalNAc₁-54_{a-o′}Gₑₛ^{m}CₑₛTₑₛTₑₛ^{m}CₑₛA_{ds}G_{ds}T_{ds}^{m}C_{ds}A_{ds}T_{ds}G_{ds}A_{ds}^{m}C_{ds}T_{ds}Tₑₛ | 29 | 147 |
| | ^{m}Cₑₛ^{m}CₑₛTₑₛTₑ | | |
| 789793 | GalNAc₁-55_{a-o′}Gₑₛ^{m}CₑₛTₑₛTₑₛ^{m}CₑₛA_{ds}G_{ds}T_{ds}^{m}C_{ds}A_{ds}T_{ds}G_{ds}A_{ds}^{m}C_{ds}T_{ds}Tₑₛ | 33 | 147 |
| | ^{m}Cₑₛ^{m}CₑₛTₑₛTₑ | | |
| 790393 | GalNAc₁-56_{a-o′}Gₑₛ^{m}CₑₛTₑₛTₑₛ^{m}CₑₛA_{ds}G_{ds}T_{ds}^{m}C_{ds}A_{ds}T_{ds}G_{ds}A_{ds}^{m}C_{ds}T_{ds}Tₑₛ | 26 | 147 |
| | ^{m}Cₑₛ^{m}CₑₛTₑₛTₑ | | |
| 789774 | GalNAc₁-57_{a-o′}Gₑₛ^{m}CₑₛTₑₛTₑₛ^{m}CₑₛA_{ds}G_{ds}T_{ds}^{m}C_{ds}A_{ds}T_{ds}G_{ds}A_{ds}^{m}C_{ds}T_{ds}Tₑₛ | 33 | 147 |
| | ^{m}Cₑₛ^{m}CₑₛTₑₛTₑ | | |
| 790436 | GalNAc₁-58_{a-o′}Gₑₛ^{m}CₑₛTₑₛTₑₛ^{m}CₑₛA_{ds}G_{ds}T_{ds}^{m}C_{ds}A_{ds}T_{ds}G_{ds}A_{ds}^{m}C_{ds}T_{ds}Tₑₛ | 28 | 147 |
| | ^{m}Cₑₛ^{m}CₑₛTₑₛTₑ | | |

[1028] The structures of GalNAc₁-34ₐ and GalNAc₁-37ₐ are described above. Compounds comprising GalNAc₁-52ₐ, GalNAc₁-53ₐ, GalNAc₁-54ₐ, GalNAc₁-55ₐ, GalNAc₁-56ₐ, GalNAc₁-57ₐ, and GalNAc₁-58ₐ were made using synthetic routes described herein, routes similar to those described herein, or reactions known in the art. The structures are shown below:

[chemical structure]

### Example 42: Single Dose Study of Modified Oligonucleotides Targeting SRB1 In Vivo

[1029] The compounds in Table 42 were designed to target mouse SRB1. Wild type mice were injected subcutaneously once with a modified oligonucleotide listed in Table 42 at 4.5 mg/kg. A control group was injected subcutaneously with PBS. Each treatment group consisted of 2-4 animals. The mice were sacrificed 72 hours following oligonucleotide administration to determine the liver SRB1 mRNA levels using real-time PCR according to standard protocols. SRB1 mRNA levels were determined relative to total RNA (using RIBOGREEN®), prior to normalization to PBS treated control. The results below are presented as the average percent of SRB1 mRNA levels for each treatment group relative to the average for the PBS treated group. The results below illustrate that the oligonucleotides comprising various modified GalNAc sugars decreased target mRNA levels and several oligonucleotides comprising various modified GalNAc sugars were more potent than the oligonucleotide comprising an unmodified GalNAc sugar (GalNAc₁-37ₐ).

TABLE 42
Activity of modified oligonucleotides targeting mouse SRB1

| | | SRB1 mRNA | SEQ |
|---|---|---|---|
| Isis No. | Sequence | (% PBS) | ID NO. |
| 736690 | GalNAc₁-37_{a-o′}Gₑₛ^{m}CₑₛTₑₛTₑₛ^{m}CₑₛA_{ds}G_{ds}T_{ds}^{m}C_{ds}A_{ds}T_{ds}G_{ds}A_{ds}^{m}C_{ds}T_{ds}Tₑₛ | 41 | 147 |
| | ^{m}Cₑₛ^{m}CₑₛTₑₛTₑ | | |
| 752534 | GalNAc₁-59_{a-o′}Gₑₛ^{m}CₑₛTₑₛTₑₛ^{m}CₑₛA_{ds}G_{ds}T_{ds}^{m}C_{ds}A_{ds}T_{ds}G_{ds}A_{ds}^{m}C_{ds}T_{ds}Tₑₛ | 36 | 147 |
| | ^{m}Cₑₛ^{m}CₑₛTₑₛTₑ | | |
| 752533 | GalNAc₁-60_{a-o′}Gₑₛ^{m}CₑₛTₑₛTₑₛ^{m}CₑₛA_{ds}G_{ds}T_{ds}^{m}C_{ds}A_{ds}T_{ds}G_{ds}A_{ds}^{m}C_{ds}T_{ds}Tₑₛ | 39 | 147 |
| | ^{m}Cₑₛ^{m}CₑₛTₑₛTₑ | | |
| 736694 | GalNAc₁-61_{a-o′}Gₑₛ^{m}CₑₛTₑₛTₑₛ^{m}CₑₛA_{ds}G_{ds}T_{ds}^{m}C_{ds}A_{ds}T_{ds}G_{ds}A_{ds}^{m}C_{ds}T_{ds}Tₑₛ | 45 | 147 |
| | ^{m}Cₑₛ^{m}CₑₛTₑₛTₑ | | |
| 754154 | GalNAc₁-62_{a-o′}Gₑₛ^{m}CₑₛTₑₛTₑₛ^{m}CₑₛA_{ds}G_{ds}T_{ds}^{m}C_{ds}A_{ds}T_{ds}G_{ds}A_{ds}^{m}C_{ds}T_{ds}Tₑₛ | 51 | 147 |
| | ^{m}Cₑₛ^{m}CₑₛTₑₛTₑ | | |

[1030] The structure of GalNAc₁-37ₐ is described above. Compounds comprising GalNAc₁-59ₐ, GalNAc-60ₐ, GalNAc₁-61ₐ, and GalNAc₁-62ₐ were made using synthetic routes described herein, routes similar to those described herein, or reactions known in the art. The structures are shown below:

[chemical structure]

### Example 43: Single Dose Study of Modified Oligonucleotides Targeting SRB1 In Vivo

[1031] The compounds in Table 43 were designed to target mouse SRB1. Wild type mice were injected subcutaneously once with a modified oligonucleotide listed in Table 43 at 4.5 mg/kg. A control group was injected subcutaneously with PBS. Each treatment group consisted of 2-4 animals. The mice were sacrificed 72 hours following oligonucleotide administration to determine the liver SRB1 mRNA levels using real-time PCR according to standard protocols. SRB1 mRNA levels were determined relative to total RNA (using RIBOGREEN®), prior to normalization to PBS treated control. The results below are presented as the average percent of SRB1 mRNA levels for each treatment group relative to the average for the PBS treated group. The results below illustrate that the oligonucleotides comprising various modified GalNAc sugars decreased target mRNA levels and several oligonucleotides comprising various modified GalNAc sugars were more potent than the oligonucleotide comprising an unmodified GalNAc sugar (GalNAc₁-37ₐ).

TABLE 43
Activity of modified oligonucleotides targeting mouse SRB1

| | | SRB1 mRNA | SEQ |
|---|---|---|---|
| Isis No. | Sequence | (% PBS) | ID NO. |
| 736690 | GalNAc₁-37_{a-o′}Gₑₛ^{m}CₑₛTₑₛTₑₛ^{m}CₑₛA_{ds}G_{ds}T_{ds}^{m}C_{ds}A_{ds}T_{ds}G_{ds}A_{ds}^{m}C_{ds}T_{ds}Tₑₛ | 41 | 147 |
| | ^{m}Cₑₛ^{m}CₑₛTₑₛTₑ | | |
| 748827 | GalNAc₁-63_{a-o′} Gₑₛ^{m}CₑₛTₑₛTₑₛ^{m}CₑₛA_{ds}G_{ds}T_{ds}^{m}C_{ds}A_{ds}T_{ds}G_{ds}A_{ds}^{m}C_{ds}T_{ds}Tₑₛ | 77 | 147 |
| | ^{m}Cₑₛ^{m}CₑₛTₑₛTₑ | | |
| 739254 | GalNAc₁-64_{a-o′} Gₑₛ^{m}CₑₛTₑₛTₑₛ^{m}CₑₛA_{ds}G_{ds}T_{ds}^{m}C_{ds}A_{ds}T_{ds}G_{ds}A_{ds}^{m}C_{ds}T_{ds}Tₑₛ | 90 | 147 |
| | ^{m}Cₑₛ^{m}CₑₛTₑₛTₑ | | |
| 739233 | GalNAc₁-65_{a-o′} Gₑₛ^{m}CₑₛTₑₛTₑₛ^{m}CₑₛA_{ds}G_{ds}T_{ds}^{m}C_{ds}A_{ds}T_{ds}G_{ds}A_{ds}^{m}C_{ds}T_{ds}Tₑₛ | 78 | 147 |
| | ^{m}Cₑₛ^{m}CₑₛTₑₛTₑ | | |
| 737333 | GalNAc₁-66_{a-o′} Gₑₛ^{m}CₑₛTₑₛTₑₛ^{m}CₑₛA_{ds}G_{ds}T_{ds}^{m}C_{ds}A_{ds}T_{ds}G_{ds}A_{ds}^{m}C_{ds}T_{ds}Tₑₛ | 91 | 147 |
| | ^{m}Cₑₛ^{m}CₑₛTₑₛTₑ | | |
| 736689 | GalNAc₁67_{a-o′} Gₑₛ^{m}CₑₛTₑₛTₑₛ^{m}CₑₛA_{ds}G_{ds}T_{ds}^{m}C_{ds}A_{ds}T_{ds}G_{ds}A_{ds}^{m}C_{ds}T_{ds}Tₑₛ | 98 | 147 |
| | ^{m}Cₑₛ^{m}CₑₛTₑₛTₑ | | |

[1032] The structure of GalNAc₁-37ₐ is described above. Compounds comprising GalNAc₁-63ₐ, GalNAc-64ₐ, GalNAc₁-65ₐ, GalNAc₁-66ₐ, and GalNAc₁-67ₐ were made using synthetic routes described herein, routes similar to those described herein, or reactions known in the art. The structures are shown below:

[chemical structure]

[chemical structure]

### Example 44: Single Dose Study of Modified Oligonucleotides Targeting SRB1 In Vivo

[1033] The compounds in Table 44 were designed to target mouse SRB1. Wild type mice were injected subcutaneously once with a modified oligonucleotide listed in Table 44 at 4.5 mg/kg. A control group was injected subcutaneously with PBS. Each treatment group consisted of 2-4 animals. The mice were sacrificed 72 hours following oligonucleotide administration to determine the liver SRB1 mRNA levels using real-time PCR according to standard protocols. SRB1 mRNA levels were determined relative to total RNA (using RIBOGREEN®), prior to normalization to PBS treated control. The results below are presented as the average percent of SRB1 mRNA levels for each treatment group relative to the average for the PBS treated group. The results below illustrate that the oligonucleotides comprising various modified GalNAc sugars decreased target mRNA levels and several oligonucleotides comprising various modified GalNAc sugars were more potent than the oligonucleotide comprising an unmodified GalNAc sugar (GalNAc₁-37ₐ).

TABLE 44
Activity of modified oligonucleotides targeting mouse SRB1

| | | SRB1 mRNA | SEQ |
|---|---|---|---|
| Isis No. | Sequence | (% PBS) | ID NO. |
| 736690 | GalNAc₁-37_{a-o′}Gₑₛ^{m}CₑₛTₑₛTₑₛ^{m}CₑₛA_{ds}G_{ds}T_{ds}^{m}C_{ds}A_{ds}T_{ds}G_{ds}A_{ds}^{m}C_{ds}T_{ds}Tₑₛ | 67 | 147 |
| | ^{m}Cₑₛ^{m}CₑₛTₑₛTₑ | | |
| 727852 | GalNAc₁-34_{a-o′} Gₑₛ^{m}CₑₛTₑₛTₑₛ^{m}CₑₛA_{ds}G_{ds}T_{ds}^{m}C_{ds}A_{ds}T_{ds}G_{ds}A_{ds}^{m}C_{ds}T_{ds}Tₑₛ | 53 | 147 |
| | ^{m}Cₑₛ^{m}CₑₛTₑₛTₑ | | |
| 801355 | GalNAc₁-68_{a-o′} Gₑₛ^{m}CₑₛTₑₛTₑₛ^{m}CₑₛA_{ds}G_{ds}T_{ds}^{m}C_{ds}A_{ds}T_{ds}G_{ds}A_{ds}^{m}C_{ds}T_{ds}Tₑₛ | 67 | 147 |
| | ^{m}Cₑₛ^{m}CₑₛTₑₛTₑ | | |
| 801356 | GalNAc₁-69_{a-o′} Gₑₛ^{m}CₑₛTₑₛTₑₛ^{m}CₑₛA_{ds}G_{ds}T_{ds}^{m}C_{ds}A_{ds}T_{ds}G_{ds}A_{ds}^{m}C_{ds}T_{ds}Tₑₛ | 66 | 147 |
| | ^{m}Cₑₛ^{m}CₑₛTₑₛTₑ | | |
| 801373 | GalNAc₁-70_{a-o′} Gₑₛ^{m}CₑₛTₑₛTₑₛ^{m}CₑₛA_{ds}G_{ds}T_{ds}^{m}C_{ds}A_{ds}T_{ds}G_{ds}A_{ds}^{m}C_{ds}T_{ds}Tₑₛ | 50 | 147 |
| | ^{m}Cₑₛ^{m}CₑₛTₑₛTₑ | | |

[1034] The structures of GalNAc₁-34ₐ and GalNAc₁-37ₐ are described above. Compounds comprising GalNAc₁-68ₐ, GalNAc₁-69ₐ, and GalNAc₁-70ₐ were made using synthetic routes described herein, routes similar to those described herein, or reactions known in the art. The structures are shown below:

[chemical structure]

### Example 45: Single Dose Study of Modified Oligonucleotides Targeting SRB1 In Vivo

[1035] The compounds in Table 45 were designed to target mouse SRB1. Wild type mice were injected subcutaneously once with a modified oligonucleotide listed in Table 45 at 4.5 mg/kg. A control group was injected subcutaneously with PBS. Each treatment group consisted of 2-4 animals. The mice were sacrificed 72 hours following oligonucleotide administration to determine the liver SRB1 mRNA levels using real-time PCR according to standard protocols. SRB1 mRNA levels were determined relative to total RNA (using RIBOGREEN®), prior to normalization to PBS treated control. The results below are presented as the average percent of SRB1 mRNA levels for each treatment group relative to the average for the PBS treated group. The results below illustrate that the oligonucleotides comprising various modified GalNAc sugars decreased target mRNA levels and several oligonucleotides comprising various modified GalNAc sugars were more potent than the oligonucleotide comprising an unmodified GalNAc sugar (GalNAc₁-37ₐ).

TABLE 45
Activity of modified oligonucleotides targeting mouse SRB1

| | | SRB1 mRNA | SEQ |
|---|---|---|---|
| Isis No. | Sequence | (% PBS) | ID NO. |
| 736690 | GalNAc₁-37_{a-o′}Gₑₛ^{m}CₑₛTₑₛTₑₛ^{m}CₑₛA_{ds}G_{ds}T_{ds}^{m}C_{ds}A_{ds}T_{ds}G_{ds}A_{ds}^{m}C_{ds}T_{ds}Tₑₛ | 41 | 147 |
| | ^{m}Cₑₛ^{m}CₑₛTₑₛTₑ | | |
| 727852 | GalNAc₁-34_{a-o′} Gₑₛ^{m}CₑₛTₑₛTₑₛ^{m}CₑₛA_{ds}G_{ds}T_{ds}^{m}C_{ds}A_{ds}T_{ds}G_{ds}A_{ds}^{m}C_{ds}T_{ds}Tₑₛ | 35 | 147 |
| | ^{m}Cₑₛ^{m}CₑₛTₑₛTₑ | | |
| 752534 | GalNAc₁-59_{a-o′} Gₑₛ^{m}CₑₛTₑₛTₑₛ^{m}CₑₛA_{ds}G_{ds}T_{ds}^{m}C_{ds}A_{ds}T_{ds}G_{ds}A_{ds}^{m}C_{ds}T_{ds}Tₑₛ | 36 | 147 |
| | ^{m}Cₑₛ^{m}CₑₛTₑₛTₑ | | |
| 801374 | GalNAc₁-71_{a-o′} Gₑₛ^{m}CₑₛTₑₛTₑₛ^{m}CₑₛA_{ds}G_{ds}T_{ds}^{m}C_{ds}A_{ds}T_{ds}G_{ds}A_{ds}^{m}C_{ds}T_{ds}Tₑₛ | 54 | 147 |
| | ^{m}Cₑₛ^{m}CₑₛTₑₛTₑ | | |

[1036] The structures of GalNAc₁-34ₐ, GalNAc₁-37ₐ, and GalNAc₁-59ₐ are described above. Isis No. 801374, comprising GalNAc₁-71ₐ, was made using synthetic routes described herein, routes similar to those described herein, or reactions known in the art. The structures are shown below:

[chemical structure]

### Example 46: Single Dose Study of Modified Oligonucleotides Targeting SRB1 In Vivo

[1037] The compounds in Table 46 were designed to target mouse SRB1. Wild type mice were injected subcutaneously once with a modified oligonucleotide listed in Table 46 at 4.5 mg/kg. A control group was injected subcutaneously with PBS. Each treatment group consisted of 2-4 animals. The mice were sacrificed 72 hours following oligonucleotide administration to determine the liver SRB1 mRNA levels using real-time PCR according to standard protocols. SRB1 mRNA levels were determined relative to total RNA (using RIBOGREEN®), prior to normalization to PBS treated control. The results below are presented as the average percent of SRB1 mRNA levels for each treatment group relative to the average for the PBS treated group. The results below illustrate that the oligonucleotides comprising various modified GalNAc sugars decreased target mRNA levels and were more potent than the oligonucleotide comprising one unmodified GalNAc sugar (GalNAc₁-37ₐ) and no modified GalNAc sugars.

TABLE 46
Activity of modified oligonucleotides targeting mouse SRB1

| | | SRB1 mRNA | SEQ |
|---|---|---|---|
| Isis No. | Sequence | (% PBS) | ID NO. |
| 736690 | GalNAc₁-37_{a-o′}Gₑₛ^{m}CₑₛTₑₛTₑₛ^{m}CₑₛA_{ds}G_{ds}T_{ds}^{m}C_{ds}A_{ds}T_{ds}G_{ds}A_{ds}^{m}C_{ds}T_{ds}Tₑₛ | 55 | 147 |
| | ^{m}Cₑₛ^{m}CₑₛTₑₛTₑ | | |
| 727852 | GalNAc₁-34_{a-o′} Gₑₛ^{m}CₑₛTₑₛTₑₛ^{m}CₑₛA_{ds}G_{ds}T_{ds}^{m}C_{ds}A_{ds}T_{ds}G_{ds}A_{ds}^{m}C_{ds}T_{ds}Tₑₛ | 44 | 147 |
| | ^{m}Cₑₛ^{m}CₑₛTₑₛTₑ | | |
| 765153 | GalNAc₂-72_{a-o′} Gₑₛ^{m}CₑₛTₑₛTₑₛ^{m}CₑₛA_{ds}G_{ds}T_{ds}^{m}C_{ds}A_{ds}T_{ds}G_{ds}A_{ds}^{m}C_{ds}T_{ds}Tₑₛ | 49 | 147 |
| | ^{m}Cₑₛ^{m}CₑₛTₑₛTₑ | | |
| 765154 | GalNAc₁-73_{a-o′} Gₑₛ^{m}CₑₛTₑₛTₑₛ^{m}CₑₛA_{ds}G_{ds}T_{ds}^{m}C_{ds}A_{ds}T_{ds}G_{ds}A_{ds}^{m}C_{ds}T_{ds}Tₑₛ | 51 | 147 |
| | ^{m}Cₑₛ^{m}CₑₛTₑₛTₑ | | |

[1038] The structures of GalNAc₁-34ₐ and GalNAc₁-37ₐ are described above. Compounds comprising GalNAc₂-72ₐ and GalNAc₁-73ₐ were made using synthetic routes described herein, routes similar to those described herein, or reactions known in the art. The structures are shown below:

[chemical structure]

### Example 47: Single Dose Study of Modified Oligonucleotides Targeting SRB1 In Vivo

[1039] The compounds in Table 47 were designed to target mouse SRB1. Wild type mice were injected subcutaneously once with a modified oligonucleotide listed in Table 47 at 4.5 mg/kg. A control group was injected subcutaneously with PBS. Each treatment group consisted of 2-4 animals. The mice were sacrificed 72 hours following oligonucleotide administration to determine the liver SRB1 mRNA levels using real-time PCR according to standard protocols. SRB1 mRNA levels were determined relative to total RNA (using RIBOGREEN®), prior to normalization to PBS treated control. The results below are presented as the average percent of SRB1 mRNA levels for each treatment group relative to the average for the PBS treated group. The results below illustrate that the oligonucleotides comprising various modified GalNAc sugars decreased target mRNA levels.

TABLE 47
Activity of modified oligonucleotides targeting mouse SRB1

| | | SRB1 mRNA | SEQ |
|---|---|---|---|
| Isis No. | Sequence | (% PBS) | ID NO. |
| 736690 | GalNAc₁37_{a-o′}Gₑₛ^{m}CₑₛTₑₛTₑₛ^{m}CₑₛA_{ds}G_{ds}T_{ds}^{m}C_{ds}A_{ds}T_{ds}G_{ds}A_{ds}^{m}C_{ds}T_{ds}Tₑₛ | 41 | 147 |
| | ^{m}Cₑₛ^{m}CₑₛTₑₛTₑ | | |
| 727852 | GalNAc₁-34_{a-o′} Gₑₛ^{m}CₑₛTₑₛTₑₛ^{m}CₑₛA_{ds}G_{ds}T_{ds}^{m}C_{ds}A_{ds}T_{ds}G_{ds}A_{ds}^{m}C_{ds}T_{ds}Tₑₛ | 43 | 147 |
| | ^{m}Cₑₛ^{m}CₑₛTₑₛTₑ | | |
| 761854 | GalNAc₁-51_{a-o′} Gₑₛ^{m}CₑₛTₑₛTₑₛ^{m}CₑₛA_{ds}G_{ds}T_{ds}^{m}C_{ds}A_{ds}T_{ds}G_{ds}A_{ds}^{m}C_{ds}T_{ds}Tₑₛ | 52 | 147 |
| | ^{m}Cₑₛ^{m}CₑₛTₑₛTₑ | | |
| 761855 | GalNAc₁-74_{a-o′} Gₑₛ^{m}CₑₛTₑₛTₑₛ^{m}CₑₛA_{ds}G_{ds}T_{ds}^{m}C_{ds}A_{ds}T_{ds}G_{ds}A_{ds}^{m}C_{ds}T_{ds}Tₑₛ | 51 | 147 |
| | ^{m}Cₑₛ^{m}CₑₛTₑₛTₑ | | |

[1040] The structures of GalNAc₁-34ₐ, GalNAc₁-37ₐ, and GalNAc₁-51ₐ are described above. Isis No. 761855 comprising GalNAc₁-74ₐ was made using synthetic routes described herein, routes similar to those described herein, or reactions known in the art. The structures are shown below:

[chemical structure]

### Example 48: Single Dose Study of Modified Oligonucleotides Targeting SRB1 In Vivo

[1041] The compounds in Table 48 were designed to target mouse SRB1. Wild type mice were injected subcutaneously once with a modified oligonucleotide listed in Table 48 at 4.5 mg/kg. A control group was injected subcutaneously with PBS. Each treatment group consisted of 2-4 animals. The mice were sacrificed 72 hours following oligonucleotide administration to determine the liver SRB1 mRNA levels using real-time PCR according to standard protocols. SRB1 mRNA levels were determined relative to total RNA (using RIBOGREEN®), prior to normalization to PBS treated control. The results below are presented as the average percent of SRB1 mRNA levels for each treatment group relative to the average for the PBS treated group. The results below illustrate that the oligonucleotides comprising various modified GalNAc sugars decreased target mRNA levels.

TABLE 48
Activity of modified oligonucleotides targeting mouse SRB1

| | | SRB1 mRNA | SEQ |
|---|---|---|---|
| Isis No. | Sequence | (% PBS) | ID NO. |
| 736690 | GalNAc₁-37_{a-o′}Gₑₛ^{m}CₑₛTₑₛTₑₛ^{m}CₑₛA_{ds}G_{ds}T_{ds}^{m}C_{ds}A_{ds}T_{ds}G_{ds}A_{ds}^{m}C_{ds}T_{ds}Tₑₛ | 41 | 147 |
| | ^{m}Cₑₛ^{m}CₑₛTₑₛTₑ | | |
| 801359 | GalNAc₁-43_{a-o′} Gₑₛ^{m}CₑₛTₑₛTₑₛ^{m}CₑₛA_{ds}G_{ds}T_{ds}^{m}C_{ds}A_{ds}T_{ds}G_{ds}A_{ds}^{m}C_{ds}T_{ds}Tₑₛ | 52 | 147 |
| | ^{m}Cₑₛ^{m}CₑₛTₑₛTₑ | | |
| 752376 | GalNAc₁-75_{a-o′} Gₑₛ^{m}CₑₛTₑₛTₑₛ^{m}CₑₛA_{ds}G_{ds}T_{ds}^{m}C_{ds}A_{ds}T_{ds}G_{ds}A_{ds}^{m}C_{ds}T_{ds}Tₑₛ | 38 | 147 |
| | ^{m}Cₑₛ^{m}CₑₛTₑₛTₑ | | |
| 790394 | GalNAc₁52_{a-o′} Gₑₛ^{m}CₑₛTₑₛTₑₛ^{m}CₑₛA_{ds}G_{ds}T_{ds}^{m}C_{ds}A_{ds}T_{ds}G_{ds}A_{ds}^{m}C_{ds}T_{ds}Tₑₛ | 33 | 147 |
| | ^{m}Cₑₛ^{m}CₑₛTₑₛTₑ | | |

[1042] The structures of GalNAc₁-37ₐ, GalNAc₁-43ₐ, and GalNAc₁-52ₐ are described above. Isis No. 752376 comprising GalNAc₁-75ₐ was made using synthetic routes described herein, routes similar to those described herein, or reactions known in the art. The structures are shown below:

[chemical structure]

### Example 49: Single Dose Study of Modified Oligonucleotides Targeting SRB1 In Vivo

[1043] The compounds in Table 49 were designed to target mouse SRB1. Wild type mice were injected subcutaneously once with a modified oligonucleotide listed in Table 49 at 4.5 mg/kg. A control group was injected subcutaneously with PBS. Each treatment group consisted of 2-4 animals. The mice were sacrificed 72 hours following oligonucleotide administration to determine the liver SRB1 mRNA levels using real-time PCR according to standard protocols. SRB1 mRNA levels were determined relative to total RNA (using RIBOGREEN®), prior to normalization to PBS treated control. The results below are presented as the average percent of SRB1 mRNA levels for each treatment group relative to the average for the PBS treated group. The results below illustrate that the oligonucleotides comprising GalNAc sugars decreased target mRNA levels.

TABLE 49
Activity of modified oligonucleotides
targeting mouse SRB1

| | | SRB1 | |
|---|---|---|---|
| Isis | | mRNA | SEQ ID |
| No. | Sequence | (% PBS) | NO. |
| 762827 | GalNAc₁-76_{a-o′} Gₑₛ^{m}CₑₛTₑₛTₑₛ | 39 | 147 |
| | ^{m}CₑₛA_{ds}G_{ds}T_{ds}^{m}C_{ds}A_{ds}T_{ds}G_{ds}A_{ds} | | |
| | ^{m}C_{ds}T_{ds}Tₑₛ ^{m}Cₑₛ^{m}CₑₛTₑₛTₑₒ | | |
| | GalNAc₁-76ₐ | | |
| 773493 | Gₑₛ^{m}CₑₛTₑₛTₑₛ^{m}CₑₛA_{ds}G_{ds}T_{ds}^{m}C_{ds} | 44 | |
| | A_{ds}T_{ds}G_{ds}A_{ds}^{m}C_{ds}T_{ds}Tₑₛ | | |
| | ^{m}Cₑₛ^{m}CₑₛTₑₛTₑₒGAlNAc₂-77ₐ | | |

[1044] Isis No. 762827 comprising GalNAc₁-76ₐ at both the 5′-terminal nucleoside and GalNAc₁-76ₐ at the 3′-terminal nucleoside was made using synthetic routes described herein, routes similar to those described herein, or reactions known in the art. Isis No. 773493 comprising GalNAc₂-77ₐ was made using synthetic routes described herein, routes similar to those described herein, or reactions known in the art. The structures of GalNAc₁-76ₐ and GalNAc₂-77ₐ are shown below:

[chemical structure]

### Example 50: Bioavailability of Antisense Oligonucleotides Comprising a GalNAc Cluster Administered Intrajejunally

[1045] Antisense oligonucleotides targeting rat MALAT-1, shown in Table 50 below, were tested in a bioavailability study in rat. Isis Numbers 704361 and 748293 are identical except that 704361 comprises a cleavable phosphate moiety between the conjugate group and the rest of the oligonucleotide, and 748293 comprises a stable phosphorothioate moiety between the conjugate group and the rest of the oligonucleotide. Isis Numbers 704361 and 748293 were formulated using a sodium caprate (C10) vehicle. Prior to treatment, rats were fasted overnight, and the jejunums and portal veins were cannulated. A single dose of 20 or 50 mg/kg oligonucleotide was then intrajejunally administered to Sprague Dawley rats. Each treatment group consisted of 4 animals. Fifteen minutes after oligonucleotide administration, a portal vein sample was taken. HPLC-MS analysis of the portal vein samples from rats treated with Isis No. 704361 and 748293 showed that both oligonucleotides comprising a GalNAc₃ conjugate group were greater than 90% intact following absorption. Three days following oligonucleotide administration, the rats were sacrificed and liver levels of the intact oligonucleotides were analyzed by HPLC-MS. The results are shown in Table 51 below as the absolute concentrations of the intact oligonucleotides in the liver.

TABLE 50
Antisense oligonucleotides for use
in bioavailability testing in rat

| ISIS | | SEQ ID |
|---|---|---|
| No. | Sequences (5′ to 3′) | No. |
| 556116 | Aₖₛ^{m}Cₖₛ^{m}CₖₛA_{ds}T_{ds}G_{ds}A_{ds}T_{ds}A_{ds}^{m}C_{ds}^{m}C_{ds}A_{ds}^{m}C_{ds} | 146 |
| | TₖₛTₖₛTₖ | |
| 704361 | GalNAc₃-7_{a-o′} Aₖₛ^{m}Cₖₛ^{m}CₖₛA_{ds}T_{ds}G_{ds}A_{ds}T_{ds} | 146 |
| | A_{ds}^{m}C_{ds}^{m}C_{ds}A_{ds}^{m}C_{ds}TₖₛTₖₛTₖ | |
| 748293 | GalNAc₃-7_{a-s′} Aₖₛ^{m}Cₖₛ^{m}CₖₛA_{ds}T_{ds}G_{ds}A_{ds146} | |
| | T_{ds}A_{ds}^{m}C_{ds}^{m}C_{ds}A_{ds}^{m}C_{ds}TₖₛTₖₛTₖ | |

Subscript “k” indicates a cEt modified nucleoside, and “s” indicates —O—P(═S)(OH)—. See Table 23 for list of other abbreviations.

TABLE 51
Liver concentration of antisense oligonucleotides
administered intrajejunally

| | Vehicle | | | Liver |
|---|---|---|---|---|
| | Dosage | Isis | Oligonucleotide | concentration |
| Vehicle | (mg/kg) | No. | Dosage (mg/kg) | (μM) |
| C10 | 150 | 556116 | 50 | 0.0031 |
| C10 | 150 | 704361 | 20 | 1.0669 |
| C10 | 150 | 704361 | 50 | 1.3406 |
| C10 | 150 | 748293 | 50 | 4.1803 |

### Example 51: Efficacy of Antisense Oligonucleotides Comprising a GalNAc Cluster Administered Intrajejunally

[1046] Antisense oligonucleotides targeting rat MALAT-1, shown in Table 50 above, were tested for target knock-down in rat. Prior to treatment, rats were fasted overnight, and jejunums were cannulated. A single dose of 20 or 50 mg/kg of oligonucleotide or saline was then intrajejunally administered to Sprague Dawley rats. Each treatment group consisted of 3 or 4 animals. 48 hours following oligonucleotide administration, the rats were sacrificed. Liver levels of the intact oligonucleotides were analyzed by HPLC-MS, and liver mRNA levels of MALAT1 were analyzed via RT-qPCR and normalized to Ribogreen. The results are shown in Table 52 below as the mass of intact oligonucleotide relative to total mass in the liver and as percent normalized MALAT1 mRNA levels relative to the saline treated control.

TABLE 52
Liver PK and PD of antisense oligonucleotides
administered intrajejunally

| | | | Oligonu- | | |
|---|---|---|---|---|---|
| | Vehicle | | cleotide | Liver con- | |
| | Dosage | Isis | Dosage | centration | MALAT1 mRNA |
| Vehicle | (mg/kg) | No. | (mg/kg) | (μg/g) | (% control) |
| C10 | 150 | 556116 | 50 | 3.35 | 19.0 |
| C10 | 150 | 704361 | 20 | 3.48 | 25.1 |

The application's sequence listing, which the Patent Office published only in electronic form, follows.

SEQUENCE LISTING (149 sequences)

SEQ ID NO: 1 - DNA, 191001 bp, Homo sapiens
ctgacagaaagcagatcattggttgcctgaggaggaggagtataggagaggtggagggaaaatgtacaaagtggcacaataaaaacttttggaatcatagatatattcactatcttgattgagtgatgatttcatgagtgcacgcgtgtgtcaaaaatgatcaatttatgcaactttaaatatgtgcagtttattgtatatatcaattatacctcagtacggctattaaaaagaaaccctctggctgcacaatgcagaactgattctaggaaagagtggagggaggatgaccatttacagtgctccaggtggaagagaacggtgccttctggaagtgaactaggttggcaacaacagagatgaaataaatgggcagatgtgtgagatacttaggaaataaaacccgatggtcaccattttccaaaggtcagctcatcctggctttccagagcaaagagctagggaagactttattaataaatccctcttgaagttgcagaggaagcttatagcagaaacttactctcaacctgactaatctgagagaacacctctggttccatttgattactaaaaaactgcaaagaacaggaggagaaagaagaagaaagctggtacaaacagtgaacttatataatattaatcaataattgtctcttgttcttaaaagcaatgggaagaaaatgagatttgagctggaagatcagagttcaaaatccaaataaagtatatggccctaatatgcttatagtagttaacctttcctgataatgatataattgttgacagcaccatctttaaaaataaaaataacatagtaatccttcagatttgtagaatgctttcctgtttacaagtttgttctatacacattatgtcttttaaatgacacactagccttctgagggtaacttatattggcaacagttttcagatgtggaaactgtgaagacaatgttggtgatgtggaagcaacataaactttggagtctttcagacccaggtttgaatgtcagactgctttttattcagagtaacttcagagcattatttctcaccttaattttttttcaggcctctttgtgtctatgtgtcctcttcactcctgtccattgttcattcagtgatttttgcaccttccttcactgttagtgtgtagacacatagttctcctggctctgagacctatgttaattccattctaccatcctgccagcccactcaattcctattgagcaatgctagttgaaagttgtggtgggattaaatgttgcaatgagtattcaaatgaggttgaagtatctacgcattctacttacatatggtgaggtatattcaaggaaggctgtagccattaaaatctcaggaaataatttttcacctcctcaggtgaaagggtcttcaggcctttgtgttctggaaggttcatttatagccatttcccaaatgacaatgcgattgatgagtctagagtctagctcaaatagcaatggactggaagactagtttaggttttactaatgtggaacatagaacaaattatgtccttgtttcagcctgttcatctgtgaaatagagcctatcatatccagtcttccttgcctttaggtttgagttaccttctttggtcaaggtaagtaaatgcctatgatgtttggctgtgcacaagataaagctacaacaaagctacaacccatcttttctctgtagaagactgcaaaaagcaaaagagacccaggcaaaaatctcggaatgacttttggaacagagagcctccccagaatcagaagtcaaaggaatttaaaacatagggaggcccagggtctctactgacataaaggaaagatgttttccttataggtttacgtttacattttctctctctttccattcccacttgcatctccacctttacacagggcttatgggacctcctccacaaaagagcagttgcagtaacccacatcatcctctacgcctggctgtccatcaagaggcgaaaagcagccctatataggttctatccttggatagttccagttgtaaagtttaaaatatgcgaaggcaacttggaaaagcaagcggctgcatacaaagcaaacgtttacagagctctggacaaaattgagcgcctatgtgtacatggcaagtgtttttagtgtttgtgtgtttacctgcttgtctgggtgattttgcctttgagagtctggatgagaaatgcatggttaaaggcaattccagacaggaagaaaggcagagaagagggtagaaatgacctctgattcttggggctgagggttcctagagcaaatggcacaatgccacgaggcccgatctatccctatgacggaatctaaggtttcagcaagtatctgctggcttggtcatggcttgctcctcagtttgtaggagactctcccactctcccatctgcgcgctcttatcagtcctgaaaagaacccctggcagccaggagcaggtattcctatcgtccttttcctccctccctcgcctccaccctgttggttttttagattgggctttggaaccaaatttggtgagtgctggcctccaggaaatctggagccctggcgcctaaaccttggtttaggaaagcaggagctattcaggaagcaggggtcctccagggctagagctagcctctcctgccctcgcccacgctgcgccagcacttgtttctccaaagccactaggcaggcgttagcgcgcggtgaggggaggggagaaaaggaaaggggaggggagggaaaaggaggtgggaaggcaaggaggccggcccggtgggggcgggacccgactcgcaaactgttgcatttgctctccacctcccagcgccccctccgagatcccggggagccagcttgctgggagagcgggacggtccggagcaagcccagaggcagaggaggcgacagagggaaaaagggccgagctagccgctccagtgctgtacaggagccgaagggacgcaccacgccagccccagcccggctccagcgacagccaacgcctcttgcagcgcggcggcttcgaagccgccgcccggagctgccctttcctcttcggtgaagtttttaaaagctgctaaagactcggaggaagcaaggaaagtgcctggtaggactgacggctgcctttgtcctcctcctctccaccccgcctccccccaccctgccttccccccctcccccgtcttctctcccgcagctgcctcagtcggctactctcagccaacccccctcaccacccttctccccacccgcccccccgcccccgtcggcccagcgctgccagcccgagtttgcagagaggtaactccctttggctgcgagcgggcgagctagctgcacattgcaaagaaggctcttaggagccaggcgactggggagcggcttcagcactgcagccacgacccgcctggttaggctgcacgcggagagaaccctctgttttcccccactctctctccacctcctcctgccttccccaccccgagtgcggagccagagatcaaaagatgaaaaggcagtcaggtcttcagtagccaaaaaacaaaacaaacaaaaacaaaaaagccgaaataaaagaaaaagataataactcagttcttatttgcacctacttcagtggacactgaatttggaaggtggaggattttgtttttttcttttaagatctgggcatcttttgaatctacccttcaagtattaagagacagactgtgagcctagcagggcagatcttgtccaccgtgtgtcttcttctgcacgagactttgaggctgtcagagcgctttttgcgtggttgctcccgcaagtttccttctctggagcttcccgcaggtgggcagctagctgcagcgactaccgcatcatcacagcctgttgaactcttctgagcaagagaaggggaggcggggtaagggaagtaggtggaagattcagccaagctcaaggatggaagtgcagttagggctgggaagggtctaccctcggccgccgtccaagacctaccgaggagctttccagaatctgttccagagcgtgcgcgaagtgatccagaacccgggccccaggcacccagaggccgcgagcgcagcacctcccggcgccagtttgctgctgctgcagcagcagcagcagcagcagcagcagcagcagcagcagcagcagcagcagcagcagcagcagcagcaagagactagccccaggcagcagcagcagcagcagggtgaggatggttctccccaagcccatcgtagaggccccacaggctacctggtcctggatgaggaacagcaaccttcacagccgcagtcggccctggagtgccaccccgagagaggttgcgtcccagagcctggagccgccgtggccgccagcaaggggctgccgcagcagctgccagcacctccggacgaggatgactcagctgccccatccacgttgtccctgctgggccccactttccccggcttaagcagctgctccgctgaccttaaagacatcctgagcgaggccagcaccatgcaactccttcagcaacagcagcaggaagcagtatccgaaggcagcagcagcgggagagcgagggaggcctcgggggctcccacttcctccaaggacaattacttagggggcacttcgaccatttctgacaacgccaaggagttgtgtaaggcagtgtcggtgtccatgggcctgggtgtggaggcgttggagcatctgagtccaggggaacagcttcggggggattgcatgtacgccccacttttgggagttccacccgctgtgcgtcccactccttgtgccccattggccgaatgcaaaggttctctgctagacgacagcgcaggcaagagcactgaagatactgctgagtattcccctttcaagggaggttacaccaaagggctagaaggcgagagcctaggctgctctggcagcgctgcagcagggagctccgggacacttgaactgccgtctaccctgtctctctacaagtccggagcactggacgaggcagctgcgtaccagagtcgcgactactacaactttccactggctctggccggaccgccgccccctccgccgcctccccatccccacgctcgcatcaagctggagaacccgctggactacggcagcgcctgggcggctgcggcggcgcagtgccgctatggggacctggcgagcctgcatggcgcgggtgcagcgggacccggttctgggtcaccctcagccgccgcttcctcatcctggcacactctcttcacagccgaagaaggccagttgtatggaccgtgtggtggtggtgggggtggtggcggcggcggcggcggcggcggcggcggcggcggcggcggcggcggcggcgaggcgggagctgtagccccctacggctacactcggccccctcaggggctggcgggccaggaaagcgacttcaccgcacctgatgtgtggtaccctggcggcatggtgagcagagtgccctatcccagtcccacttgtgtcaaaagcgaaatgggcccctggatggatagctactccggaccttacggggacatgcggtaagtttttccttccagaaatgtcgcctttcggcccagggcagagtcactctgtgttctggggtatctagcggctcctacctgcgcgaacactcagattgcccctgggagagctcagcagggtaaacctagagctctcccgtggactcccggcctgccagaggtttaacctgagctctcctaatttctgctgcgtgccctgggtgctgattcctgccctcccagattcttcaactcccccaaccgccccaaattctcactacctcctggtactcgaggtcccaaacagaaatcctattgcacgggccaccttcagagataaagctcccaagccctccactcttcctttcctcctgtcctcaaagtctgagaacctcaacaggaatttgggcaatttctcctcttcaggtctgttaggatttcactttcagcctgcgcagattagagtcaaaaagaccggcccaatagcttctcagcgggtatcctccagagaggtaaagtgaaattctcggttagggaaagaaagtggtctctgggtgctgaggtctgctgtgtgaaagggtgaacttctttctcctgaagcaactggggacttgctccagggctggaggtcagtagagataatccaaaccgtcatgtttagagtaggcagaggggcaactttcttggtaaagacttcacaggatttgcactcacagtttctcaacgttggttgactatgttgaaagtagttgcttgggtcggttttctcttgtaaagtgtttattttctctgtggattataacagatccacagccccctacttcaggtttgcatcagatctataaagaggagaatattcttttaatgtacaatttaattaggcttgactctgacttacaaaactgttggaaaacatttttttgtaaagcatttcctgctatttcagtgtgctccaaaatctccactggggagggtggagtgaggttttttattatattcctttatttttaggacatgtttgcattttagaatatgtgcagttagctctaacaaattgagtaagaactcttaatgacctatgagccgtaatcttaccccaaagttttaattagcatatgagaaaagtggcaggcaattgcatcgtgcttattaaaaattattcctcaccgcagttgttgagcttcttggagaccatgctgaagattttctcccccagcaaattaagatattagtttatctgctgagggaggacagactgaattggggaattaactcctcaggtaggccaggtgctgatgtccctgtggacttttgtcttattctttgtttctatggctgttttcttttacctgtgacttctccgaaatttctttgttagccttaacatctttgtttggggacttaaatccagcaatttgccttctttcactgatgctttccttcttacaaggtagatagcacagtgttagtaaagaaagaaagaggagggtaggatttcatattatttcgtgggctgttgaagaaacagcttcttaccaggctttacattccattaggtttttaatgtttgacttacaagattttcagagggttcatttgatattgtcaaagtcttttccagttaatttagactcttcatttttgtaatgggtttatgctatgggacaaaaaaagtattcttcattttataagaacaaatttacttggtagggttaattttttttctagggctgtcactagacggtggagcccctcttctactgtaaacttttcttgggggaaaatgtctaaggtgcattttgacctgccatgatactaaacccagacactggaaccttccatcttctgcatgcctcccccacaacttacttacttaacagggaaaaaactgatggttccacatatttgctaaaaaatgtgtgccttcaaagacaaaaccaaaatttttagggaataactatagagagcaaaagttactcccatcaagtagacaacgagcttggtgattttatttcaggtcttaatgaaaaaagcttctttatgaggaaggttatcatatcttggtgcctccttgacagtccgcttaaattaatgacataaactaatgagaatttagcagttcctgcagaaagtacaagtttattttttttttctggtttgtgattgctgcactgaatatgaggagtctagttaaagggacaactggtgttcctgtcttgtgagttgacgaagactttccatttctaggatatagaaaatccttaagccggtttattgaaaattaatcaatttaatcagaatgcaatcaattccaatacaaaagttagtattttctttctttttattgaaaattaatttaatcagaatacaatcaattccaatccaaaagttgatattttcttactttctctttttttccctcattttgtagggatacaatttggtgaaaggcaagagatttcttaagccaaagcaagagtgtcttccctctctgtgttgcatgcattatgtgccatgtttgagctaaaaatctcaaaattgggcaggcttccaatgacctgttgggtccctccctttaccattcatgtgtgtgtttatgtacataattttgtggaggggtttttttaaaccttagtaacatctgcactcactctgtgttcttatacatttacagtgtttctgctgagaggagggaagatgcaaaggtggtctcttttacttaatttagcatgtggtttgaacagaaggaaaaataaaaagtgatggggcttgtgtgcaaccctgatgatattttatggagctgtctgtcttctctctgagatcaaacaggactacaactttgttaattgaccactggctcccttggcaaaagtagggcttcttatattccagcaagcagcacaataatatgacaaaaatttattcttgggagttgggttctaagagagtgcatgccagaattagagtttggggtttagagaaattatccagatgccaaaagaacattttaatttttctcttggtaatttgttctggtctccatagtaggtagtattttagtagtgctttgatattgacaagtcttgctccctttctctattagatttttcaaaataaggcattttattaattcctctttccttctcctctctcctctcagttatcaagcatttttatgactatcttacaagcaacagtttgtcttgtaaagcagaattttcctttgaaaccaagacagattatttctgcccataggcttcaggaaccaatattttggcaagaagcatcttttctttgtggtcagcaaataggtggtgagttctgtctggatcccaacaatcaacacctgaggaccaaatagccacactgggtggcaccccattcggaagtatacacaggaagtagccctcttgcttgttcacagctcaagtcagccaaagattaacactggtgagagatattttcaaagaagtttgcaggcttccaattgcagggtcattttggggtgctttcttgcctgtactaattttatctcatcaagcttccattctttgagctgtaaactttgaaataatatactggatttgctggtacgtttaattttctttgttaagtgttttcattcccatagtaatttttcatctagtgtacatatatgcatttaaaacaaaaattctttggtctccttatgcgtatatgcactgcggcttgtacacgtacaagctacttggtgggattatgtgaactggagttagaaatgtggacaattttattatgattatttttaatggtgatatcaagatcaccagtttcattcggaaccttgcataagcagggagcagaatgcggactgggtgtggcaaagcaagggcttattttatagccaaacctgaaatcacaactctgaaaaataaaaaaaaaaaaaaccaaacaaaaaaatcaagttttgtgagcttggtcagagaaggaaaaggaaatctctccctaccccccacctccaccattttctctttgtctgcagcttcctcaagtgctgcctgtccccgattttcttttattccactcctttcatgtttttgacattgaaatacagactcttctttccacttctcagggtatttttcttattacacctgtggcatgctcctaaagaatttcttttttaaaaaaaatctgtagagtagtagattagattaaccccagtatctctcccttaagactagatgacatgaggggattgcaaaatgaatagctgggtttttttttttttttttttttttaccttgaggttaaagcctggttcaacagttgctgagagagttaactagattgcttgaggacttggcaatttcataaagtattttgtcttatgctgtctctgtctctgtcttgatctctgtctctctctgtctactgtaatgttggctactttctctcagagcctgagagacagctctgagacacttcccaggtctgttcggttcagacctcagtagctggatcacaagcagtacccaatatgcatatgagggtgcgtgctgcaagtgtccggctgggctaatctgcttaagcttcataaaaattaatcatttgaaaacaaagaaagatattaaagaaattattctatctccgacttcccctatcagcattccatcaagttctgggatgttaaattcagagaaagttaaccttatcttaaacacaaagttgacttttaaacaaaattgcttataaagttctgtacagttaccagcattggttgccctttgtcgtacggaagagaattatgaaatctcatatttacatagcattcttccaaaaaaagagacggtgttttccagtttattcactgcattcgtgtaagtgtgagtaggccaggaggggtgcttagtgattacccttttgctaggtaacaaagtagaaagttagattttctatgatatttgtttaccacgtaggggaacctctctagagcaatactcccaagctttttcttcttgaaatttcccacctgacagataatactttagattgttgctcttaaggacttctctcagtagctgctacatagagatgattgtccgtgaattattgcttgcacactcatgggtgatgctactccctctctctcatggcaattcttgctgccaacctgcaggccacaccaggattgagggcagctcatctcgataaatttatagcattaaagtgctgggtcatttgagaatgttgtcaatttaggttacttagtacctaagttttattctttaaataacagctttattgagacgtaatttacaatccatacaattcactcatctaaagtgtacagtttcatgctttttagaatattcagagttgtgcaaccattattgcaatcaattttagaacattttaatcacccccaaaggaaaccctatgcacctttgtgttcatccccctatattccctcagtccttagcaaccaataatctacttctatctatggatgtgcttattctaacattttgtatgaatgaaatcatgtaatatgtggtcttttgtgactagcttctttcacataaaatatgttttcaaggtcatccatgttgaagcacatatcagtacttcactattttttatagcctaataatgttccactatatggatataccacattctatctatccatttatcaggtgatgagcattacggttgtttccaccttttggctattatgaataatactgctgtgaacattcacgtgcaagtttattgtggacatattcagtccacatattttggacattttcagttcttttggatacatacataggattgaaatctctgagtcatatgatacctctgtgtttatccttttgaagaactgtcaaactgttttctaaagtgtctgcactgttttacaatcccatcagcaacctatgggggtccatttcttccacatccttgccaacacttgttattctctgtctttttcattatagctatattagtgggtgtgaagtggtacctcattgtggcttttatttccatttccctaataacaaataatgttcagtatccatgttcttattggccatttgtatatcttcttttttgagaaatatctatttggatcctttgctcagtttttagttgggttttttattattgagttttaagatttttaaaaaatatattctggatacatgtcctttaatagattgtgatttgtagatattttttcacattctgtgagttgtcttttttactttccttttttttctttttacgttcttaatggtatctagattgaagcacaaaaatgtttttaagtttgatgaagtccaattcatctatttattttctgttttggcttatgattttggcgtcgtatctaagaagtctttgcctaatccaagatcacaaagatttacatatgtttccttctaagagttttatagttttcgctatttacatttaggtctttcatcagttttgatgtaatgtttatatatgactgaggtaggggtccaacttcattcttttgcatgtagatattcagttctcacaatattgttgttgaatctttcctcacttaactgtcttggcaccctttgtgtaaaatcagttgaccgtaaatgtgagggtttaattgtggactctcaactatattcagttgatctatatgtttattcctatgccggtaccacgttatcttgattattgtaggtttttagtgagttttgaaattaggaattttgaactcttcaactttggtcttctttttcaagattgctttggctcttgtgggtcccttgaattttcaaatgaattgggataagcttgtcaatttctacgaagaagtcagctaggattctcacaggaactatattaaatctgtaaaccaatttggggagcattgtcatctcaacaacgttaagttattttcatccataaatatgcgatgtcttcccatttatttaggtcttccttttgtcaacaatttttattgttttcagattataagttttgcagttctttttaaaatttattcctaagtgatttattttttgatactataaattgaactgtcttattgattttattttcagattattcgctgccaatgtatggaaatataattgttttgtatattgatcttgtatcctgcaaccttgctgaaaatacctgagttttgaatgcttctgggacttatggggaagagggcttctgctgctgcactgaaagttaaagcttacttcatttcatcctgtatgaaggctgcatggggacattcttctcagttttactcagctataaattcgaactggtaatcccatcccctttcgggatgaataggagagtgtttttaaatgttcatctctttagagaacagcaggaaagaagcctagtaaggtttgggtagtttataatcccttttttagaatttggatttgggaactattagcaaggcagtgagtaataataataatttctatatagaaaactaacatgtagaggtgacaaatgaaatcactagctatattaggcttatgtttaggttatcgtaagcagctaaaatcataattttatgtttttatatgttgtcctttggacaaagtaaattccagtactccttctgatgtgcatttctagatggggaaaggattcatttactctcatataatttaagcttctttttagggatgtactccatagccatgaagcaaagataaaattcatctatacacagactgaactttgtcttcattaacactctaggctaagggtcatagctaatcagctacaactgtaatgtcctgataattgtgaattaactgcagggcacccagcaaaaggtttagttataatctaatagctgtctgtagagattagcctaataaagggattttttaaaaaagaatctggccgggcatggtggctcaatcctgtaatcccagcactttgggaggccgaggtgggtggatcacctgagatcgggagtccaagaccagcctggccaacatggtgaaaccccatgtctactaaaaatacaaaaattatccaggcgttttggtgagcacccacaatcccagctacttgtgaggctgaggcaggaggatcacttaagcctaagaggcagaggttgcagtgagccgagatcatgccactgcactccaggctccgtcaaaaaaaaaaaaaaaaaagaatctatcaatcaaccacttttcattaagcacctgctatgtgcccagcatgtgctaggaagagataaggtgaaaggggacacaattcagacagaatcttcttgaggtaactgcttacgaggagcttatagccactaaaaacaaaaacaaacaaaaaccaaacaaccaaaaaccaaacagaaatgcagtatcatcatgccatgatgcctgtatgagatcctggattgtacggtatggatttcttaaaatgtagatattttaaaaaaaaagaggaatgaatcaatagaggctgaagtggtcagcaatgttacctgtggctgcttttaatccttcgtggaagtaagtaggagcatgtctaaactcaagcaatagattaaagatcttgatgtatattttaaataacagaagttagtaccactggaaagaatgaactggaggaatgggttgaaatctatttctgcttattcaatagtgcaccccagtcaagttagttgccaatttcttcttcagtttctttggctatatcattgcacttggtgggtacatgtttatgatgtctttatctgaacaagtcagcaataatatgagtaataaattaaaattgaaggtgattaatggctctgaatttgacataagagttgttttcctgccttctaagtttccattgatcctgatgaattgcacaaaccaaacaattcggggagtaagggggcacatgatgatcttataagagctttgctgtattagacaacgtaacattctgaaatggcctaccacctaacatgggctctgttctctgcaggttgagtaggttccttgcttgtggaactgtagtcccgctatttggccgctagggggactgcaagtgccccgtggcaggatttccctgggaatggtgagcctccattgatggtttcaacacacagccaaggccctatcgcaggataacttgaaccagaactgcctagcaccagacaataaataagctactatggtacttactgtttcatttgggatgttgtttctcgaagtggcaagcattttttagtaatattttgactttttaatacctttctttgcatatggagcagaaaacagtgacactggatatattcaagtagcactgtccagtttatagagaagtttcatattccattattgcatttcattcttgtttctaccttttacaagtaactagagtttggagtattataatagtattcatactattacagtactattattcccattataaaaattgtgcaaagagtggttaagttacatgtttacaatcaaacagcttcaaagtgactgatctggaatttcagtcccattctttcttctccagatcatgtgttccctgcttttatctcacagctctttttaccttatagatgggaaacatgagagtcagagaggcaaaagaaccacaagtggtatcaatactagaaatttatgaatttcttaaggcttctaggtttgttacccatccaccagactgatggatttggttgtgtgagagttctgggtgccaataaccttgccattctactttacagactgcatatattcaataaatgcttattaagcatctactatatgccaaattctgtactaggcaccaatgatgtagtggtgaacagaacagacaaaaatctcttcgtggagcagacagtttaatgagaggagacatgtagtgtacatctgagcatgaaaagtgccatgcagaataacttcacagagtgtagggtatagagattgatggtgagagggaatattttatatttgctggccagggaaaaccttactggaaaagtaaattttgagtagtgacctgaaggaaattaggaaatgagctgctatttggacatctggagttagaatattccaggcccagggaaccacaggcgcaaagggcctgaggcaggagcacacttgctgtgatggaggacaaagaggcccatatggctggtttaaataagtgaaggatggtagacaatgagatcagagttaatgaggttgcatggtaggtcttccttaggactttgaattttactcctaagcaggttgtattggacggttttgagcagggtaacatgacctgacttacattttaacaggctccctcctcttcataacatctgtcactctgatatattatacgtttgtttgtttacttactgtatgtggggggaagagactgtgggagcaaggggggaagcagggaaacaagtacactgcagtgatctgggtgagaggtgaccgtgtctcagactaaggtggtattggtggagaaggtaggaagtggctgaattctggatgagttttgatggtatagccaacagcatttactgacagattggatattcactgtgaaaaaaatagagatgaggatgattgccaagtttttggtctgagtaactggaaaaatgagattgccatttactgaaatggtgaagactgtatgtagagcaggtgcatgggcagggtagaaatcaagagtttgatttttgacttataaagtttgaattatctgatgaacatcctgatggcttcttctcagttagttctcatgcagtgccttcagctttgctgttcttcaagaaaattaaaaaggaacttagagatcgcctaggctgtaggtaccctctcccctctttccttttactttatagaggtctatagaagggtagggacttatccaaggtgaaacagtgagctggcgacagaactagggcacaaacccagttctcttgaattctgaatcagtagattttctttttttagtgtgattctgaggactcatttgggcaagagtgagttttttgttattgttttttgtttgtttctttgcccaaacctaaaaccaggtaattaaactaaatagtgaataaaactgggaaactatacaaattggttgctctccccaatcacactgaaatattattatttttactgaaccacataccaaaatatttttcctgtaaaaacacagtaagtgaacttttaaaggcaattgagcttttaacaaagctagaatctacagaggacctggacagaaatggccttaaatcctaggaaattagagttcatggaacctgggagaccatcttgtccagctagctcattttatgggtgaggtgcctgaggcaccaagatggaaagggacctggctaagctcatacagcaagctagtgcctgagcctagtcagagcctgttttaagggttagtcgtatgttgttttcttgaaaaaagttacattggaaaagtgaaaattctttggtccatactgagaacaaagaattatacataatcatatataataataatgatagcacttcctgaatgtttgctgtgtaaactttggcaccttgcatgaattgattcatttaattctcatgtcaactttaggaagcaggcctagagaggttaaggaacatgtccaagggtcacacagctaggaagtagcagaacttgtgtgcactcccaggaagtctggcttctaaccacaaggttctaactactgtgcaataccaggagcttctcagattacccttcacctttaccaacccaaatgactggtgacgtaggtgacttcattatgctctgcccctattatagtccactgatcctcaccaaataggtgggtggcctagaggttaaagtagaggcagagtgatggaaaggggtggttagaagaagttgatgactcatgatagggattggaaaacaggactacaggaattattgaaaagggcctagagatcccaaggaggttgatctccgactgctacaaacctgggcaattcaatgcctgcttaaataggagagttaagataagaaaaataaaattgccaatttttacagtcagacattgttttatttattttacatgtattaattcatttaatcctcaaaatactccatgaggtagctacaattatcatttctatgttgtagatgaagaaacaggcacagagcaattaaataacatgcacaagattagagaacaagtaagtggaagtgccaatattagaatctaggtagttcagctccacaacttatgttattttccactatatttatggaatgaggtaattttcttataacagaaagtttttaaaatgcaaaaacattgtgcctgaacttcaaacactgaacaactcatatccttaatatgcaccagtttcttttaagcactcttagaaggaaggatacttaacctaatgtcacatggtgagtaagtagcagaaccggaacttgaatttgagactccggactgccagacctctttccactctatcacttgggctcccttctaacattgacttgtctccctccattcctcctccgtattgttctgcccttcaccttttaattacctgtctccatcaacaagattggacagagaattgggagagtgagcagagtccatttccttccagagactggacaaaaggaacaaaatgttaggaaaaaatgtcagcatgtgggatttgtgggatttacactaaataagaagggacacttcccaggactgacaagatgctacctccgtccctctaggccccaatgtgttgtgcaggatcccataggaagtcatgaatgtggttgtcagataacctttttgttactgtggaaatggaagcaggctactgcaaaaatctgtctctccaggttttcttttaaagaaggtagtcttgctaaatgataactatttcagcatttatttgaaaatgggcagtgcaggagagaaagaatttttccaagcttgtcacattgggccacctctctgaagcattgtccaacttctaattagatgaggagactgcataaaccaagagttgagagtaaagatggaaacacttgatgtttggtgtttgggtgcagaaaggattccagaacatgttttgggtctctttactctgtccatccctccttccctttcatctttgtttaaaaaccacagttagcaaatgtgtagtctgtttgcaattgttcatctgaaaaatttgtttgatcagccttttgaataaaaaagaccaaattagactgagatatttcagtcaccaactatctaataatagaccaaaaattttaaccatgctcatactttcatatggtatgtagtttgctttagacattttctgggcttcagtgaggtgctagattgactcaaaatatggcaggtcagatgtgggattgagcagggtggactcttctctacccttcccaattcagagttccccatcaaagatgatctcatagtgtttgaaaaaccaagctgaaggctttgggaattagggtgctgaagggatatgctgtttcccaaagccttctcagtcattccttctccccccagttcagattcttaacacctctttccaggattagtgcagtgatcccacgtcctttctctctagctctctctgctactctctaattcctattgtatttgtgccaccagatctttccaaagtttagctccaatcttgtctgtatactgctttaaatgtctattagtctttaagctccttaagggtgggagtcctgtcttattttttccctattcttcgtgcttaatgcaaaggaagccttgctgtatagttgtgtaatgcatgattacaatttcagcttctccccattggcttatgggttaaagtccaaattatttaaatctggtgttcaagtccttttatgatctgcttatttttccagcctgaattcctggagttcccttacaaaactcttaaaacccagccaaaaggatctagtcactgtcactttaaaccatcctcactctcttgttttttgaacatgttatttttcttataatccctttgaccttgaaggctatcccaatttcaatactatccattcttctatgacagccccctacaaaatgaatattctcaacctcccaacccaaggagaagtgatctatatgacacaatatggttgaaagaatgttggcttcacttctttatctgtaaaccaggggctagaaatctctagtttataagattttgtggagaggggatcatatgtgattatggatgttaggcacaagtcaagagtgcataagaccttttggatttatcccttttttctttctccatcaatatggtacttagtcccttaaatcagaagtacttgtgttaatgtctgataacgtccttctaaatatacctctaaacatctgtctctctttagggcaaaggttggatatatctgcaaagattctctttggatataagatatccacagcacataacttaacagtggtgtacacagtaggtattccataagtatttctttatgaaatgattcagagtcaatagtagtaagtaactgccaaaaacaactgatggattgtaagttccattaacataaatacagtcagccctccatatccatggattccatatccacagatttaagcaactgcagatggaaaatatattttagagacacagtaaaaataacaattcgacagtaaaaaaatacaaataaaattatgtaaaacaactatttacataacattgtattagctattacaagtaatctagatataaatgaaatatatgggggatgtatataggttaaatacaaatatgacaccattttatatgttttagttaaggaacatgaatatttttggattttggtattcatgggagtgggggaatggaaccatgccccttcaaataccaagggactattatatgggacacagaataaaggagttgattgtcttgctctgttaaattctggtcagacacatttgcaatgtattgttcagccccagtattcatggagcatctccttttgtaaagcatggaggagctgtgagagagacatggagcagtgaacataactattgtttcaacgtacctgaaggattatcatggaataaagaagttagatgtttttctgtagtaccccaaagggcaaaagcaatgaggacagattacagttcagtaaacgaaagaggtttttttttttttttttttttttttttgagatgggagtcttcactcttgtcgcccaggctggagtgcaatggcgcaatcttggctcactgcaacctcgcctcccgggttcaagtgattctcctgccttagcctctggagtagctgggattacaggtgtataccaccactcctgggtaattttatttattatttatttatttctttatttattttagtagagacggagatttcatcatgttggccaagctggtctcaaactcctgactgcaggtgatccgcctgcctcggcctcccaaattgttgagattacaggcgtgaatcaatgtgcccagcctgaaagatattttcttagaatagcttctttcacccttcatcagaagttgtcaacatggaccatatgagttttgtttggtctatatggtgtatatgtgtgtgtgtgtgtgtgtgtgtgtgtgtgtgtgtgtgtatgtgtgtgtgtttattgaattacttgctaacattttacttcaaaattcagatttccaccatagggaatgaagatctggcaatacaggactttcattcctacatggtaatgaccagctgtaggtgaaaagcagctgatcctctggatgggccatgcactttgcagtttgcccaggcagcactgatccgctttattcatttaagttacctgcttgactcttctagtcattcgagtatgtcatccccatcagatcagagacctaagcaaatcttgggtcccttgcttactccaagggctttcactcctcgtataggaggagctaaagaaatgtacaagcagcaccacaataggatcagacctggctttcaattctagcacggccacataacatagttggatgacctcaggacagtaacataacccctctgagcctctagatcttcattatctgtagagcactcttcttatagagttattataagaatgaaataaaacaactaggataaagggcatggcacttagtaggtgctgaaatattagttcccttcttctaattcaccacaccatatctgtctatctattggctgaatcacataaatagtaaattcacattcactgaagacattcaagaagagtctggaccctttgggaaccatgtatagggcaaaggtttgaactcatagtagatgatttttacagtcactttttaacaatttaaaagcctatagatgactccaaaatgcccatttggatgatatgaggcatactttgtgtagttaaggattttaaatacataacagagaggctgaagggccttcgggaaagaagctggggtaagagtcaaagtgtagtatgttgaccgatgttcaggaataggctttggcatctgacagattttgttttaaatactggctctgggtcttactagcttccagttctgggctgcttcacctctcttgagtttcagtttcttcatttctaaaatgaagatactaatgcttcctttgttgggtttttgtgaatataagtgagataataaatgtaaatatctagcccagggcctggtgcatagtacaagcttcataaattgtacctattattattagtagtagtagtagtccagacaaacagagcttgggaaaacgctagactctggctgacatacatgggcttttccccaggccactgctgcctggcttccccttccacaaagctttgagtctccaaaatgctttggctggaatgtaagcgtgaggtcattgcagataacaggggagcatgatttgcttcggtaatgcaagttattaagttacttccctcagcccagctgaaatctcttattggttgatgtgtgcttcaaagtgtgagacagagctagtctgaggagagagggagagtgagaagattcctcttcttggccagaggtcatggtcttccacaaggaacagaatgactcaatgcaaattatgggacctctttgagtttggggcccctacatttaaactagtaactccgttgcacatattggcacccttcccccaacaaaattactgggcaggaattttcttgaatccttccgtggcctggaatgatctcccttctcatccttgtgatccacacagctggcaaatggcaggcagcagaacaaaaacaagcctcttagcatatagggagagaaagagtcacagcagtactgaatttgcttgggaacctaatgttaacaaaggaccttcctctcaacaccccaaacagattaaaacatttttttaacagcaagttgtgtctcggagcagctctttgcttgggtatatttaaagatctgctgagtcatttaagagcaggctggcatatcctaagaggcaaggactataccccagtctatgggggagtaagttgagaggtgaaatctgtttggctttctcccatggaaacaaacaaggtgatccacttccatctcccacgactctggagagcatctactaagccttcttattctatcaactttgaactcctcagtgtataatagagtaagggtgagagggaaggagcagtcgtaccagtgtcattattggtatgttcaggagttcaatttcttcctgattcagtcttggcgggatgtatttgtttgggaatttatccattttttctagatttttctagtttgtgtgcatagaggtgttcataataccttctgatagttatttttatttctgtggtgtcagtggtaataacccctgctgtctgaaattgtaatggccctgctattggtagctgagagtagcatggaagtgtcaggttgatgggttcatttaattcttttcttttcagtttcagtcacatgcattgttaccatggcatatgacagttgctagaaagtgaaataattttttttctactttattctccactgcacttctaaatttattagtggagaaattagcagttaccaactgttcattataggtacacattggggtttccttagagccaattttccccctggttttcatcttgtaaatctgtaatcctaaaaattagcaaaacctagagcttctctttggtcctggcctgtttgaaccctgttccacagaccccaatcttctttcttgtttgaggcaactatccttctctttgcccaccgccattttccttcatctacttttcccttctctagcacctcagactgtcttcccacagtggcacagcctcccactccactttcactgtgccatctccttgccatcaaaaccatcctcacagacccttctgaaaccacttctaggaagggaaatcacaatggatccatgaaggatgctttctggatgactttaaaagattggtattaagatattttatcagtggtagcaacactgacttattcaggcagccatgccccggatctataagaaatcaggtaagctaaaagttgcttgagctggcaggagacctagttctcttttttcctttccctcttgcattttgtttatcgatggttttcaaaggacttagaggctggctttgttatagttagttggtaagagaaatggtggaggaccggaaaatgggagtggaacgaatgagcatgtttgagactaagttattacaattcctaggatgtataaattgcttgaaatctaccaagtactttcagacacattatcttttttactcttcaaaatcaacttggaggtaggcacaacagggatcaaatccttagttcacagatgagtaaactgagactggaggaaattaaaggagattccaaggtaactcagacaataagcaacagaaccaggatttggtgaattttttggggggtgggaggtacagagtctcactcaggctggagtgcagtggcaaggtctcgtctcactgcaacctctgcctcctgagttcaagtgattctcgtgcctcaacctcctgagtagctgggattacagacatgtgctacaatgcctggctaatttttgtatttttagtagagatgaggttttgtcatgttgcccaggccggtcctgaattcttggtctcaagtgatccacctccattggccttccaaagtgcagggattataagcatgagccactgctcccagccccagaccattaatttttgacagtaagtccaacttttttcaagttcacagctcagatttgctattgaatgaatgagtatatatgtcatttgggaacattctttccaacttttggttgaagatttgttttatcacttgtgaaaattttttttcattcttagcaatgtcagtttagttaaatgagcatttcatttgcgaattcactaattaattattttattcatcaatacatttcctgagtaccaactttctatcaaaccctgtgctggattctgaggctacaaagagaaataagataccatctcaggcctctaaaatctcacagactggggactgacatctcagtagtaaacatatgaacagcaacttgtgaaacgccattagcaaaatctcaagttatattcttcagtgactatggccatcctaaaaatggggtgtcttttatttggggtaaatgaagatgaagccttatgagaaattgcattttaatctaatcttgtcttgctaagaacagaagtggaatgtttcagcctctgtgtgtgtatttgtgtgtgtgaaggttgagtgtgtgatgatggatggggctgcgagattgttaagtaggatctatggggggccttaaatggtcctggtgagtcccaactttctggttatgtatttgagtagagtatgggggtgacaaagattgttgtttaagagttgattttagattttttccaagtaaatggtcagctgacttggagcatcatcattccacttgctttgaaaacctgccacttaaggctccttccagtcataggttaactctttctggtcaagtattactctttttgagcatttacctgtcagtgacaggtacaatgttagatgttgtctctctgttttcttgtttaatctttactttgatcctaggtagctcttattagttccactttataggtaagaaactgaatttcagagacttgaatgacttgttcaagatcacatagtatagtaacttggtagtttgggacttgaattttgattgttcagttttttgtttgtttgtttcctggcctccctgctgttttcactattccacaccacttcagctttatttttcatagaggccattaaatgtaccctccatcagccaaagcctcttgcctcccttcaacgtaactcttctctagcgtcctcttaataatcttctgaaaaggttttacagcctttctgggtactgggacccagagtcttaatccaggctcttaagtgccttatttaactgtaatatggaaaatcaaagtcacagctaattcaggaaaaatgagtttgggatgtgaatttcctaggcaacttgtcatctcttttttacttccttagcttcataaacttacccacaatgttccctgaggactaagagtaatggagggtgatgaggaaaggctttcctcccttcctttccgagagtcctttagccaaatgccacacctcctcctgtttccctagtctccgtgcagagatggaagtgggagatagacatgggttcctttcagccctgagttcatgccagggttttctttccctctagctggactgaggtaggaggagaggttgaagtccaccaataagaccatgagtgaagaagactaaagtacttgaaagagcagcagacctacgcttaaaatactagggtttgtgtccagactttgtgggttactatctgtataattttgggcaagtcaacagttctgagtcagagttcccttatcagcagattggaagataaattctaattatatagatgaaacattaagtctagaagtaatttgtaaattcagaaagggcttatagatttaaagtgtagccgttttgattaccacaaactaaatcctatacttcagggataaaatcttctcctgttttttctaaaagcctgtgcatgtgtggtgtaaggggtgggttttcccttgtaccagcaacttagcaattgtagtaacggggctgagggcagtggcatgcttcttcattgagcaagtgtgaaaagagggttatgcattcaggggtcagcagatggcaggcagagtagcccctccaaatctccctcccataccacaaagccctcttatttattcaaacttaacattagaagctcatttcaagtaggcacgtctgtgtctgggcgtctattttccttctttgtatatagcaggcatttgtcaacttggtgaaaagcattactcttctttccatttctgaggactaattgtgcttcttcgctagacacgagttcaaaacagtgggttgaaagagggcaagtttatgccaaagaatcagaaatagtcataatttagagagaattctagaggtcagttccctttcgtatggactgggcaactgaaacccagacagggaagggaattagaccaagttcacaagcacaaacactttactggcacattcagattggaaatcgagggcttctgctcccaggtcagaactaaatgccctttctagctagggtgttctttgatctcagtgattttgactctttctactgcactctggggacagtgggttctgcggtaccaactccaattaaagtgggaatatgtaccagcccctccccttggtttttatttttcagaggcctggcagtcagagggattctgatctctatatgcaatattttcacactactgtacttattgaaatcacatttgaatcttggcaattaacaaggcagtaattggcatcaggagggtatgttagtttgcttatctgcgccgtccctcctcttcccaacccactgtgtattgcagaatgttttatcagctctgatttgccaagttgctctcttctccagtaggtgctgcgagcagagagggattcctcggaggtcatctgttccatcttcttgcctatgcaaatgcctgcctgaagctgctggaggctggctttgtaccggactttgtacagggaaccagggaaacgaatgcagagtgctcctgacattgcctgtcactttttcccatgatactctggcttcacaggtgggaggttcttcaattgaaaacttagaactcagtttctagggtagtgagtgttgtaaggtttggactgtgacctaatattacgcagccatgacattatctattaggcatctagactagcttgcttgaatatcttagcatgttgactaatttggggcagaatatagtgtgggtgggggattttgtgtgtgggggggggttgggggttgagcaattcattattattaaaatgcaaaaagcacttaattcgctatgataagattgcctttttcatgcatactggcctacctgcaagacccctagagacagtaagcagcatacatggtgtcttccagttttcagcctttgtgcaaggaacaactgtgggtttctgcacatgtgttgtggtttgatgtttgtatgtgattgtgtaccagggtatgtgtgtctgttattgtgagttcatttctgagcagttgtgacacacagagatccagaaacagtgtcttaccctgtgtgctttgctagtgggaacgtgtcttttcttttgtgctcgtatctctgtgtaatcgagtgtcttgctaagtcaatgtgcctctgtctctttttaccagttctgtctttgtgtctctgtgccttcatgtattttttcccctgagtttgcacgtctctgtctatgtggatatctctcactccaggccactgtatcactgtgtctgtattacagctgtttatttctgtcggtgtgtggatttctatgtctgttttcatcttaatttgtgtgtctaagcaagactgttttggggtgactatttcagtttatgtcatagccattctttgtgtgactgcttctaggtatgtctttttctatgcccctattgtccccatctccatgtgtctctgtgtgtatatgttctaatgtatctgcctacttatcttagtttgtatttctctgggtgtatatccctctcttgcagttctgggcctttgcagtttttggcttatgtttttgtatatatccactagaattggcttcttatcttttttgtgcatgttttagtttgtatgagtgagcatatccaactctgtctttgagaagcagaactgtctgtgtttgcagtcagttgtgttggctgtccctgtgtttgtccctgtgtgtgcatttcattgtatgtgtacgcatccatgtatctttctgcttctctgtgaccagatatttctgtgtagctgtctatgtatattggcttctgtctgtgtctgtgttgttggctctacgtctgtgcatatgcacccaccgggttcataaaaagctcacctgctctccaaggaatctaccagattattttgtgaaataactcacgtttcgtttttttacttgccagctgctatggtacttaaaagtgtgttggtacgtaggtgtgcataatttattcatgtaggatgtcaaaagagtcagttaaaaattatgcacagtgtgtctttattaacaggacacttgtgtgtagagaatccttgagaaatgagtggttagatgataaatcttttcatattaatttcatgatgtcagtgaagtaaatttgcaagatatgggctgcataagaactatgttctttttaaaactcagcatattgatggtggagaaagcatttatttgtactgcaaagtcttatttctgataagacatcacaaataagaattattgtgatgagacttatcacaaataagaattattgtgataattcttatttgtgataagaattactgggttagaaggtgttacttttctggttttgtttgggtttttgttttgaagtgttactacagatggtgtcttagggacaaagagctctgaggttgacttagaacacatggagtacagataaaaaggagaatgaaaagtaacagagagatgggcatattccttgtttgaatggagtcatccaggggctcaggatggagtgcacaggaaatggagaggtgaaggtcatagagagaagtttagcaggaccagatctttccttgtcctgggctgctgtgaccatataaggaaggcagtaaggggaggggtagggatgaggaagagaccagctctcctctttctttctgatggaaggttaccacctctatttaaaacttctgttcttttggtttctctttctttctttgattatattattttctggacttgttctgccaaagcaagaaggaaattccacatgtggctcactcatttattatacttgtttctttgcacgatattaaagacagcttgttaagtgtcactgcaaacatcatacacactgatccactgatatgggcagggggttctttatgccagttctgctctcttcccagtgtatctgtggtgcttaatgggcgcaaccatgatttttctgatgtcagtctgtgatgtcagttgtccagtgtgtatgcaggctgcttaagagtacatacagttccttcacaattatggtagtccctgagaaggaagtggtcattaataaaagactaggttcagtagaaacatgtaagttgtctaggtgttggaaattaatacagtactgtgctaagggaacatatatctagaagttaactgaattatgctcaataaaaagagtacaaatgtttcataaatattttgacctaatcctcctgtaagattaggagagggatatttccgatattcaaataatttttttaattggcaaacaccttagacatactatttacataaaattgacatgacaaaattaagtcattgtgtctgttttatgataaaacaggctcttttgatttagttagaattattgaatgtaaaataatgaaaattaaaaaaaaaacaaggaggaggaatctatcctattttataattcagaccgttgaattgagtttttcttttgttgtattgatttaaatgcagagaagtctatgatgctggattccagtcagaagataaacatttgtatgtgggctctacattgcagccaaccttgataatttcaaacctcgattttctcatctgtataatggtaataataaagcctgtctcagtagctaccaaatgattgcatatgacaaacttctcacttatttaagggaaaaaataagaaaaagaaggacaatagggtggatttttcatatagtaaaatttattcagttagggtaatattctgagattgtcttctgaagcaaaccctgcaaaccctggccattctgttttgtttaggaaagaattcatcagttctgattctgccttttctggggagggaggctgagtattggattgaagaggagtcactacttttctgagatgatatatccgtggtaaaaattattaatgctttgcacatgcaacatagagtgttcaattttgttagtcaacaaatatttaagtggcagctgttatgacctcaggggtgtagtgacttccttattgtcctttaattattaaaaaagaaatctatatcagaatatcaggtaaactcttattacatcaaatattataataaagatactttttatattctctaaacaaagtagagatctcagatgttggttcatttatcaatataatattagatttgaaaattccagtatacaaaaggaaaaggacagcttcttaaagtttatagtgattttctatgaactatcaattccgtttttttctgttttactggtatgatggaaactaaatttcgagttgtaagtagtagataattagactgcagggtaagccttgagattacttcttttcaggtaggaaactctactgtgtatttggctagttcaacctatcatgggtagtcaaaaatagttacatatacaagtcagcattttttaaattgttcagttgtgcttaagattggtcctttccaggaacaatccagctttatcaaaaaattattgcgtacatgtaaagtgttctgacattttaatgctcacaatagccgaatgacgtgggtaagaatcttcgtcttcattttatagatgaagaaatgaagacacagagacataaattaactgggccagggtcctaccactagaatgtgatagatgataatttgagctcagcacatagttatttccctataatatttgttttatgattgtatagatgtctgctgaccaaccttaatctctgctccctaagattaaccattctacaaagcagaaactggaggtcattcaaatgaaagctctacacttttagagggccattaacaatgctcaagttaaagaaaagcaatcaaagacaactaaaatactggtaccttcaaacagtacttatgaattatttaaccttagataatttggctttgagttagaaagatagagtaagatggaggaaccaattcttccctgggttgatatttatttatcttgctcttttgaagtctaggccaatcatcctatttattctgaatggcccgttaacgtttatccatttagggacagcaggtttggcacaaatggattggttttctgaggtcttatgtagagggctgcactgactgacttctgaaagtcccccctaacccttcaaatctcagggtcatctggtctcaagccttcaattatgaatacatttctattgcctttttgagtaacagcacaacactgcaagctgacccactgggtggatggaatggggctcttgccctaccaccctttggcaaacaatttgagggtggcattgtcactacctcattgtatatagggtctcttgaggcccagaatggcaaaataattttcccagtgtcacacagcgagttattgtcagagtaaatatcaattttgaatttgtagaccacgtggttttacctcatcatttctgtttgttatgaaagttttacaaataattagaagtagaaataatgattaaaataaagcataactactaaaaaatagtttattgcagcaccacctaaattcatctcaccactctaccagtagcatacatttcacaattgggttaacattgctctggatcttatagctgttgaagaagacaaaattctttccattctccagcttatattttccccatttgtaaaacataatggaagtgtacggaaaataggagttgataatttttaaggcccttgccagcacattagtacataggattcttgcaagtggtggtttacttcacttcaactatagaaggcctatgcgacaccacccatagagggtagtttgaaagaaaatgctagtgactacgtgtgtttccttcctgacatattttatagaaggtgatgagttccagcattttttcagacttggatctggctttcattccccttctcctcccaccctctaaaacaacagaggcagcaaccatttacacactttccagaagtaagtaagtaagactgtattccagaaacaccctatatcaaaatggaaatatactcaagtgccccaatgacccattgggctagtttgaacgtgtgcagtctctgtgctccccgttttagcttaagcctactccctaacctgtcatatgtcacccagccatggagcctagggcaatgactgccatcatatctgactttatggcctctcagctttcaatgactagctttgtagcagaagtttagcctctcatccccataactttggaagtagtgttgagataaagaaacgttgaattgaaggttgtgttttctagatttctttcaattgctccttaggctttagaagataaattctcctaaaagagaggtgctacaattaatccaagcaaagggaaagatgtcagtaaaactgccccttttcatagaggtgtggcaactgctgggaaggaagaaattagcctgaggccatgtgattactaataaactcaaagcggcatttttttacttctcaatatgaggttgaaactataagcttaaattgctgactttctggcagcaccaaacagtaaggaaaccacaaagataaacccaaataatagagccaattttctttttttccgggggggatgacttctaactagtgatatgaggaaggataagaaaatgtttctttgtaggacatatgatctttgctaagtgcactgaatgtatgtagaggagacaagtctgctgagggtatgagaattgggccaagatttaacacattttcaaagctccatgaagaagcctactgagcagtgggagtggagcaggttggggatagtgaagtatttgtaattcatttttaaaaaggagagggagagagaaaaggaaaaactgggccacccatcctttgaaaagaaaccttgaaagaggtccaaatatccttagaaatccttgacttcttaaaagtgatgtttgttttttccccctgacaattatagaggtcagagagtttttcttttctattacaaaacattgagagtgtgtagaaataattgtaggtagcttagccttggctgtagtcagaacttttgtactgtgactttaggatctgtatggaatcgtatgatatgcggatacaccaaaaactctatgggttatcaaaatgggatagcattaaaagaaatagtgcttttgtttagaagaagaaatgaaatgcttgtgtccagatgcttaaaggaaggcagtgcagactttcagaaactagactttaagagctgtactcagatactgagaagggctgatggctgaaggaggaacaatttaaaagaataaccgtctctcctctccctgtatattggacataaaagaatatcccattcttttcagaaatgtaatacaacagtttagcttgctagtaacttcacatgctatttcctttacctcttatatttgaggtgtctatttggagtgggctgtgtttctagctattctgtttatctggtttgtttttgttggtgtaggaaactggtataaattttatttgggtaaatatcacctcaattttcaactaaagctttatttaagtttcacatgaaaaagacaaatgaggcaaaggaagagaaaaatgcattgtcagaatcagaattatgagaaaaaaagtcaaacaaacatatttgaaatgtccagaaaacctgtgagtttttatgtatactatacaggaaagatattctgtcatctggttgccaaactatggagggtgggagacttcgaatttttgtcaaaaagtattctttcattagaaagatacatgggtgtgcttccatgtcagcaacatgactgcagaccaggaagtcctcacggagagctggaatatgggtattttggactctctggttagatgcagcttttacttcacatcctcagtggtactactgtaaattttcattttcctgtggaataccctatttggttccattgtatatagttgacaactagaattcgttcgctgttgcttgagcccaactataacttcttggcactatacctatcttctgatgtgcctgtggaagagctaccataatgaatgtgtacatggacaaaaaaaaagagagagagagagagaattaaatcatgagtttgtgccttgggagctacagtttaaacatttgctgtttttctcacttaatgaaaaatttatttgaaaataacagcacagaaaggaagaaagacaggctggcaagcatcctcctcctaatacacttatccacgtttggataccttggtctcagcctcagaggtcatatttttagtaaaatggccaccagaaataaaggattttattttccagactttggtgtttggagctggtgtgctgagagctagcagagaaagccctactcaggtagatgtaccagagcaggatggttgctggtggatatggtggaataccttttatgtggttatctcctccttgtaactcttggctgcataacccttattttcttttctatttttattctctctcttggaaaaaaaattggtggtaaattttcatgtgagccatattgtctttttaaatagttttattaatataaaatgtacgtaccataaagcatacccatttaaactgtaaatgtcaatgggtttctctctctctctctctttttttttttttttttggatgctcagagttgtgcaacaattatcaaaatcaattttggaacaatttcattgccccaaaaggaaaccctctgcccattagcagttactccccatttcccccaccccctgacccttcaaccctaggcaagcacaaatgtactttctgtctctatagatttagccattctggacatttcatgtaaacagaatcatgcaatatgtcaccctttgtatctggcttctttcacttagcatgatgtttccaaggttcatctgcattgtagcatctgccaatacttcattccttatttatggctgaataatattccattgtattaatgtatcatatttgttttttccaatcatcagttgatggacatttgggttgttttcatcctttttttagctattttaaataatgctgctatgaacgttcgtgtacaagtttttgtatgaacatctgtttttatttctccttggtatacacctaggagtggaattgctgggtaatatggtagcttaacatttaatcttttgaggaactgccagatttttccaaagcagcagaatcattttacattttgaccagaagtatatgagagttttagtttctccacatcctcaacaacactcattattgtcattgtccttttcagcttttttgataatagtaatctcaatgggtgtgaattgggaccccatcatgcttttgatttgcatttccttgaagagtaaggatattgatcatcttttcatgtgcttattggccgtttgtatattttttgatcctttgctcatttccaaattgggttatttgtctttgcattattgagttgtaagatcttacaatatattttggatgtttgtcattttagggatgatacttcacagttatatgatgttttctagcaagcatttgcgttgttctactggtgttacatatcttagctgcattagccactttgctgggtatgaatgccagcagaatctaagtgaccttggcttcactactgagaatgcaacccaagaacagaaatttgtcagaaatttagcactgaagccccccacttcccaaacttatctgggacaaggagaatctacatttaaagctctatactttgtgttgtgttttttttactttagcttggttggatttaggatcttttctttttgttttgccttatgcatacctaagcagaggcaagggaggaaagggatatgaacctggtagaaaagtaagtaagctttattcagattggcatatccatcttaatatggttcaattggctgaagaagtatctcaactaaaactctggaatactttgaagtaccagcaatatgtaccaaatgtactttttatttatgtttggtctctatgtacttgtgtgtgaaacaatgagcacaaataataccctccttgtttttaagcaatttatattggtgatttaaaaataaaataaactcaagtgggaaatcatgaaaccccatgtaaaaacaataagagcatgttttaaaatcccacagactttagtttcaaatagtggttttgctatttcttagctgtgtgtcactgtgcaagttactttgtttctctgagtctttattggtgatatatgtaaaaacccaccttctcaaattattgtgaggacaaaatgaagtaattaacataaagttcctggtgtataataagtgttcatattttgtatttgagcacagggcaactgggtttttgaaactgcacattactgttgcagtcaaatctggcatgaaattagtgcatagacagaatgggctgggaaaatgaaaggactttgaacatttatattctgctttatttaggcataagtgcttaataattattgatagtttcttctggttatctgacattttgaagatactattacctagcagaaatttcttgtaataataatctcttacacttatatactgttttgtgcctttagaagtacttaatgctctttatttcactatctgttcataaacattctctgaagcaagcatacagtcagtatgaattccatttttcagatgagacagctgaggctgaaagacatagagttacttgtctcaattcacaaagtaaagtgccagagtttgaaccagagcccaggtcttctctctcaacgtagctctttttctccttcattatatcaggcatagtagcaacgtattcttttactagctttttatcttgaatatccttttagcgacttgcctttggtgttagtgtgcctataacattgtcgttgaatatcttaatacatttagtggtcttggcaagcagttttgtcttcagaaggacactgaaatctgtggaaaggactgcagaagattgggtgggcagacacctatcactttcggggctggtagactttctattgaagcaatttgcaaggctactttgtattgtctaaaagcactacttcagaaaagggttgtgatgtcaaaataggcactttgagtgaagaaagggctgtaagcatgggtggaaaatgtggtagatgattgtcttgagttattttctttaatgtcaaacaggcagtccttggaatgctacttcaaaaagtgttgtataatgttgaagatacagttacagatttccaacacgaaactcataaatatgcaattccctgtcctcctaggcacatgaaggaaaatttatgagcttcaggtttctatgcagctattaaagcatatttaatctgctttgagctcaagctcactctcgttggctctcttcgtttcttcctcttacatgagcaaactgcctttctttttgtttaaaaatagtaagtaggtttgttttcctccaggtgtcatgaatgcaaacattgtaatttctcatctgttcagcctttttgcacaacaaaatggcagcacccaggaggttgaaagggttaaattgttccttctctgagtagtaccataagttgttagtctgctactctttctcccagttggcacatgaccctaacatccaatcgctagtggtgtggccattttttggtcttattttggcctttcctcagccaccactcatcagttctcatgcgtatttgtcagatcctgctccccaactccacagttcttagttcatcttaagcatatggctgtctgtcttttctctaaagatcctcaagggaaaaaaaaaaaagcatctccagggggaatttactgcctcatagccctgacagagatttctgaccaaaccctaacgaaaaaatttcttccctccatttgtcttttattgtttttacaggggagatatgtaacataataacaattatattgcacataataattacttctacaaataataatctgttgtcaaaaatatacacagctttggatttccttattatggcccttcattaagttgtggtttaagaatagctatgattattacttttgtgataattataatccataatatggaaacttataaaattacctttaaagtgttactattattctggccacaggatggaaagttgttcgctagttactcatttataacctgaatgtactttttactgaatctaaaggtatcatctttgcttggcaattcccatgacttgtctttctgactcttcagatctcagcttaaaagctctcccttcaaagaagccttccctgaccactctggttttttcttctttttttacctctactccttttcccattacttgctgtcatagcattctgtttgtttcctttgaagtgcctattccaatttgtcattatgaatgagtttttttgttctgttgcttattatccattttccccactagattgtcaactctgtgagggcagagaccatgatactctgttcactcctatatacattcccagcactatcagactttttggcacatagaagatactcagtaaatatttgttgaatgaataagtcataaagaagagtttatattttaactcttagttgaataatctaagccaagaattatcaacctgggttggacgtgagaatcattaatgaatctttaaaacaatgacaaggcaatctatttattaattatctccaggtctaaactttagcacgtatatacattttaaaagcccataagtgattcttacgtatagccagtgctatctgtctcttctcctgtcctttcccctcctctccttactcctctctcatagttttaggattagcatggccccacaacaaatctttaattcacatggcaatttctaggatttatcatggaaaatgagccaaattgccttcaagaagtttttacgtacctcttatatagaatgtgatgttttatatgtacctcttatagaatgtgagcttttaagaggcatatcttattgcaagaaatttcaatgttgaaaaaaatattgaatatttataaagtcaaaaatgcaaacttttatatgattttcaaacctatgaagttatatcatgttcaggccttctttccagcatgtggctctcagccctggtactgtccttaaccataaacctcatctttgccctctatagggagaggtttatggttataattactcattttaaatagtgtatattagtaatgtacactatttgtatatttgttgactgcctcctatatgccaaccactatgctagaaattttgtaatattcttcacgatattcaagatattaacatatccgcattttataaatgaggaaactgctctcaaagaggttagtttacacagccagtaagccgctaagcctagattggatggaaggtatgtgagaaaaaagcagcatccataaggttttcattctcctaccctgtacgacagaggtaatagaaattattagttaaagaaataatagaattttacaagactctaggaagggagaatgtgaaggatacagttctcagttactggaatgagtgccagagtaccagtacatggcttgccttggggtttggactacctatcttaactcctttgctcctcccaatcttgatctcatttgtttgaaagatcatctgcccaacataaaaatgcatttctaattctgtaatttaagtcagtggcaagatcagattcagttaaagtttactttcctgacagctttttagtatcatatctattttgcaaaactctagtgataaatgtatgcacatttacacatacagcatctcttctgattctgactaagatattactgggttgtgtagaagtgatgggctctttagaagaaaggtttgatatactactaatctaaggactgaattttctcatctttgtctttgccccttttgactgatgaccagagcaggagcacataacattcttttgtgctaacagtatctctgcatcacattgatcaggagaattggcatctccagagccctgggatggtaacttctctgttgattttcaggaaagattaggtgatattttctccatgggaagaggatgtttgatgtgtgttggctttagcaaaaggaagcttgtggagtcaactgtaagtagacagaattgcctttgacttaatctgtttcagtcgttgttcatactcaggtcctccagaggacctttaagcatttttattgactttgtggtctattacacgaaactaaagatactgattctcagtcatgagtctgctccaaaattgcctagggaatcaaaaataattgtaccagttcctattcctggacattatgattcatttggtctggtatgaaggccaggaatctgtatttttaaaattcactcaagcaattttcatatatagctataattgaaaatctgtggctgaacttctccactcccgtatccatcgcaatacttccccaaggtggcatttaagatgggcctagagggttatataagatttcaatattaaaacatggattaaaagtgaagacttttcacatggagataatttggaagaaaaacttgcaaaaatgtgagagcattgagaacttttctttcccaaggaaagaagtggcagcttcatttttggtcattgcaaacagcagtgccatacatgaaaggaaagtggtggtgctcatcaactttgaataactttgtacagaacccttgagactcctctctgcttataaagaaaaagtgtcaactgtaaagttgatttatttatgaaccataggctactatgaaatctctgttcccagctagaggcctgggagagtaagataactacttgtttattccacggagccacttattagctttttctatagcacatacctcaaatgaagcatttcaataaaagaaccacattctattcacatgcttcattttattctgatttatgtaaaaattcccaaactcctcaagcagtgtttctttgtaaggcaataatcttcagttctgttgcaaaggtcaggagtgatagaatgaaaatggtactagatacaacagctctttggtatttgcatggccattacattgccatggggctgcaagacttgtgagtgcttgatattttgcttgttgatgaatgagtctgtgtttgtgctaatggagtgatttgagaggtagttctccactgtcagtcaagaggttggttttgaaagctgattgccaatggtcattctgctaaccactctggttctcctttagatagagacttattcagattcaagtcttcatgtactttgtggcataaacattgtacacaccagatgtattcaacaaccataaaaaaaaacaattaggactcaagtagtatgtcagagtgtagtcactgatgatatataattctccactaccaagaagatggaagcacactgttgagtagctacatcctacatatgttggccagaatttaggaatacacatgtgatctatacattttgaggtattgtctgacccctagaaaatcctggtgaagtttttctggtgtcagtttggtcttaatgtttaggaaatgcccacagactactcctgctttctgcttattcacatagtaaacgcaaagcacaggactagtttgtcatctggatcaaggagaaatgagttagcagatataaaataaatcagaaaggaggtagttctcaaatatttactccatgaatagttgctggatgttcattaactctatagcatttgttactacttattggggatcctggaaagaaaatatattgtctatatccactgttcactgaggccctctccctacccagaaactccctgtctccatcactcactctccacattcattgacccaggggaacagttcatggatgagtgaacttgagctctatcttaaaggatggagttcgatttcaaggcaagaggtataagagaaagttcagagacaacactggctatggtctttgtgaagaaaagtgaattgaataggctcctgtggagatcttaagtaagtacttctggagataaggttgaggaaaagtaggtttgaatcttcatccagaggtagcccctaaatgtgttgagtttattgaaagagtacttgacttggattcagacagatctgcatttgactcctgttttgccatttataagaatttgagtaattattgtttctaaataagagtttattgagccaagcactcagtaaatgtttgaatgggaaaattaactgccctgtttttctattgtcagatggtcctcttcgttggataacttggtaactgttgataaccttttctcaggaatcagaaggtagaaaggttgggaaaatataagaaacaaaaaggcatattcctatttttattttcatattgtcttccaactctcccaggcttctttgtttgcaaggctgacttttataatactttttgggtagagcaggtccttctttggtttggggttaaaccgtgagtaaccttattttctaggtctcagccaactttgaagggcatgaactcacagtagcctcactaggatcacttcagcagtgagaatttatctttcttgtataaaagtgtaagagttgatggcggccaggcgcagtggctcacgactgtaatcccagcactttaggaggttgagatgggtggatcacctgaggtcaggagttcaagaccagcctgaccaacatggtgaaaccccatgtctactaaaaatacaaaaattagttgggtgtggtggcacatgcctgtaatcccagctactcaggaggctgagacagaagaattgcttgaacctggaaagcagaggttggagattgcagtgagccgagattgcaccactgcactccagcctgggtgacagagtgagactgtcaaaaaaaaaaaaaaaaaagagttgatagcaaaataactatctgtagcataaacctcagtattctttatcattcagtatcaacattattactgaaaacaataagcaatatggactgagtttctgtggggtggaaatgtgaagtggatcatagcatgatataacttgtcatttggcttcctttataaacattatcaactacctcagctctatcaatcacttggcagtccgtagtgaacattataactcaaatgactagtcaggtctgttcattgcccatgtaaaggcatatacctgaagtgagaagtctgaggtaacttagcaataagcttgcagtacagtgtttagtgaagccgaggaattcaaggatttgagtcatgccagattgctccataaccatagcctatctttgtcacaagtaagaaggtttaaaaatcaccataccattattggtcacaacgtttggagatagggaagagtttgtggatggatcatggcagtgcatggacagtgattagcccataacacaaccagtgaacactgttgtacccaaagcacataaatcaccacatatactattaatatatttatggatgacaacagacactataattttatgtcagtgctttctgctgtgaaaaacaaagaaagttaagggtaccttttttatatttgcatcatatctccagaccttttcctttatctccttcttgcaagttcttctttctttcagctgactatctgctgttcctgctatggctcccagtggcttttcaagagggtacttgttttttaagagaagacccttgaaggacagagagagcctgaatcattcaaaataatgaattactcaggatgaaatttcaataatttgcaagtgtgtggagatagatattttgaggaagcataattttctatgtacccctcaaatcgtggctggagatgacagcctcttccacctccatataagaccatttcatttccttctacttttttctccctccttcccccaaacacacaaacatacacatatcctgtgcttcagtcacacagaacttcttactatttcatttcaattctctatggctttgcatgttctgctccttctgcctagaatgctcctttccttttttcacctggaaacatcccaattcaaatgtcacctcccttatttataccaactttgtctgtaactcctttatcacacttcttcctgtgattagtcaattcacttgtctgctgttacacctctatgagagatgaaaattccttctccatctctggaactcatgcccttcgcatatagtaggcaatctgtaaatgtttgaaggttgagtgaattaatgaatgaccttcaacctttcaggcttccaattttctctctgaaaaggacagccaaatgaaaactcataattttagaagatgaggttagacggttggtaggtgcatgcagagaccagttattatttaggtattatggaagtttatagttcttgtatgttgagttcagtgtaagagtggccccaaacatagttaatgaccactccagacccagttgttatagagttggccccagctgtattgcttctatttaagactaggataagaaatgacactttcctactttttaccttattgaaagggtagaggctcactgttatcaatctcagttcacttgttgattgcactggcttgccaagtgagaatattagcacctctgcacatttctatagctctgccacttatgagatctttccttcccattgtcatatttaataatcaggatagccctataaaatatgcattctcatttcccagatgaggatactaaggctcaagtaggagaacttacttgtttagtaagatcatacagctaggaagtgggagaggcaagagttgaacccagatcttcctagctcctagtccattgttctgtctactgggtcacactggaccagccaggaggcaggaaaatcagctggggaatgtggtgccaacgtgtgatgtttgcctaaatgtgtgcatccttgctggaagccagccatgattcatgctgcataagtattcattaatgttcatttcatttatttggctatccatatgctttccagggcgaaggcaagctaggacaagggcagacaagcagccttaaagtttgggtgctttccttcgaagttgagctgcctgtttgaaaatcacactttttggtgatagaagatggttccagtacagattttatttattactgcatctacatggatagacattttccaaagcatagctgaaaatatgtgtaagtcccagaatattttctgatttagacacagactttgagcatgataaccacatttagcatgttaggaaattctgtcagaatgcttctggaaaggctacctttccagaatgaaatgaaaaaagaaaaggatggactttgaaactggctagatttgggttatacttactcatagtgtgaccctggcaaatgatttaacttctccgaatttcacttttcttattctttgaagtgaaattttaaaatgccatcttgcctgatttttgtgagaatgaaaatgagatcccacaccaggaatttagaagctactcagtaaatattgcttctctcctttccccttccccagtcctgtcccccgagacattcagtagttattcacaggcatgcattctgaagtctgcctactgctccatgttgaaatgcactgctcttgcaaggactgattatctatttttctgtcttccaaggccccctgtgttccactccaccctcccaattctgggggcttccaaagtgggcaggtacagaatgttctgtggagcatcggaggctgttactcaatatcttggccagcactctcaactgctctttgcacacactccatatgaaggcaaactccagatcttggagcccatgtgtgtgtcatgcattgtactgcttcttgtacccaaatccatctcaagggtgagtagaccaggctcagacttgtcctgggagcagatttctcaagctgcccatgtccccacactgtttgattaaaaggaggtgcttcaaactctttggctttatatagactagaatcagaatgattggtggtgcctctgttctcaaggtatcccaaagcactttgtaaggaaatatgacaagcgctgaggccatgcaggccagtacaacagccgccacccagcacttcacaattagtcatgcccagcctgggatcatcaagcctgtttttattggaagagcaagagagagagggaatgctagctggcaatttccccaggtaccctttatgaaagtgcccttggctcttccaatttcatctgaataaccagctcaggcaaattttcctctatcaaaaagcagaatgtgatagtgacaagctgatgcccggctgatgccccaggacattgactaaatagacttggcctcacaattggtttttattctctatctcctttcttcccttttgttctttttctgtgtttctttccccattgccatctgcagagtgttctcagtcagaagtcagctgtggggtggacagtttgtcattttaagatcatccctattctgtctacctttcttatccctcatatcattgcttttagagcaaggacaattctggaagtgaaactacaataacactctgggctcctttccctctagtagtactcaacacacttgtaattacatgttcaaatttgtctttcttatttctacttaggttcatgaaggcaagggacatgcctgtgttgcttactttctcttggcaggcacatacagcaagtcttcaaaaaatgcttgttaactacaaattaagtgtttaagaagtccactgttaattagccgggcgcggtggcgggcgcctgtagtcccagctactcgggaggctgaggcaggagaatggcgtgaacccgggaagcggagcttgcagtgagccgagattgcgccactgcagtccgcagtccggcctgggcgacagagcgagactccgtctcaaaaaaaaaaaaaaaaaagaagtccactgttagtatcttttcccctgcctagtttgtaagcaactggcctcttctatttgtaagttacctgttttcatttccatatgccccaaagcaaactttagctcacggccttacagagtgtgtatgttagtatgttaaaatgaaatcaactttcctctcccaggccttctaattgacatgaatttgggagtagacttgcattggcctttgtcctgacagccaacagagtcctcttctgttgtattcactgttgccttccatgaggatcccatggagaaagtttgtcattgatatacattttgagggcagactcaacttgagtaaacctgattgagctttccccatctgcctcccagagatcactgcctgtgctttgttaaaaagagaattataggagtcctctcaaggcagagaggcctaaaattagacatggcagccatgcctttggtgtgcatggaggttggatacaggcagccagtttcccctctgttttctcccttgcttacacagccaaggagtggagccaagcctcaaggggaggagctgtatactcgagcatgccctgtggttcctggccctgactgagggactattttatatatcccaatagagaagcgtggaagacatctaggttgccactgtcatttgaaattggaatttttaaaagagaaacctgaagacttgaagaaagctttcttttgcctccccttacagttgatttttgagcttcttaaagctacctagtccaaagtacccacactcttattcttttgtctttcctactggttttatttttttttcatcttcccaggtgtttgatgatcactaagagcttcaacattgctcaccctgaccaggtatgaagccaagagtttggtttagggcataaaagaatgtcggaactcaaggactaggttgaggtggggaagggggatgaaggcttctttttttcttgggttaagcagaaataacttagatctcagagtgaaagccttgaattatcacatatatcactggaaaagactagttctttgctatgataacaattgttcatcatctctcccctgaggatttggggtcaaggcctggctacaccttttaatgatttcagtcatgtgacttaacctctttaaacttggattttcttcatctttacaatggaaatgatgacaataatcactacctcacagatattgataataatgatatctcactaggaagagaattaagtaatatgagggataaaaaggcatttgtaaatggtaaaatgagattatgattttgaaagctattattattttcctttcactgtctattatctcaactcttctattttcttgccttttgtacagcatggataatttagatgtgactctggacagagggatggatcagatgacttcttaagttatcttccagtttaggagttcgtaaactatactttctcctttccagactatcctagtaagaaaattctcttttaagacagagtagaactctggaattcatcagttttgatgtttcttaaagtgtaatctaagatagtgctcctgtattaagttctgatgtctgaccattgttcaaataaagagtaaaatgcaaatgacaggaaattggctgcgttctgaatcctatttttatttgggataacaataagcctgtatggtcactgtgacctttgatttgctgtttctgcaacctcacacttgtctcaggattcttcttccacttctgcactttatattgggtttcttccaggcatcatattaaactttaagccaggtatgtgtatatgcatgggctgtgggcctgaaaaaaattagcccgagagagaaaaaaatttaagtagtgggctagaagtaagcatgctactagaaacagaatttgggaacacagctctgggcctagaaaagcgacctgtcaacttgttacagttaacatcaataactataggatgggtttggtggaaaattatgctgaccaacagggtgggagagaatagggtcagaatatatatcgctgtaaggttgagaaaaaaagaagtgaaaaaaaaagaaatgcatagagagaaaaaggagtttagaggtaacatgttaaagtgtgagaaataaactggagagcttgacttctcttgaatatatttttaaataaagtactcctttcaactccaaatgcagcaggcttggttcccttctcctacctccattgcggatgaaagcttaatctttaagatgggcttgggtgggtagagtacgccccttggtgagcactgtgctctctgcaaccccaataaggcccaacagggctctccaaggaggcaaaattctgatgatacatttctgtttagtggaaaatgggtagggaaaattatgtcttagaatcaattaaccaaacataaaatcctccaaggggcttggtaggatgcctagggaagagccacgagataaaaactccaggctggaagggcattgttgcagcactgtcattctccagtttctcttggagttgtcaccaccctctcctttgttctcactgctgacatcatttgtaaaataatttcttcccttaaataaacaagacatacaatcctctaaatgactaaagaacagttacctagaagaaaccttagtggaaagtattttcttcatctaacggatgattgtctttacagaggtggagtaaaggatgtgcgagggagcataatcaagctaagagatgcatgctgacttaaaaggcatgatatatgtgaaactaagataatgtgttcaagagtgatgctttgttgatgcagaaccactgaattccttactattatgtttgcctgactatcggcctcttaataaagaacttgtggtttgagtgttcattgaaattagccatattaggtttatgtggggatgtgaggatctatgtctaccaattgcagcctctgctgcaaattggaggcagaaatctgggctgaacaataggtaagagtgtcaactctacagatctctcacatgctaagcaagcacaatatagggcaatccaggtttacacaaaggattaatttgggaacaattatcctcattttcacttcctaaaaagattttgaataagatgtcttttaagtaagaagctccctgaatgcatttaaaatatgatttgattatgtacatttcagatttttctacctttctaggagtatctctgttgtataaaaacacaaaattctggaacttttgaaaggaagatgtgcctctcttcatacatttgtcattcttgaacgattgtaaaatgaagtgactgcatatcacgtcatgtgccctattgatttcttttcttgttttaggaatattcccagaaaaaaaaaaaacttttttttttttaaaatctactaagcatgctaggtaagactgaagatgaatctatttaagttatgtcaatatctatttataaagatttttgtgatattcttttcactgtagaacttcaagcatatcctaaaaggaacggttagatacctctacaaactgtggcaatgacttactgagtaattgctggcaactgatttttggtgcttcttgttttgatagtatagcagtgcgagtaggtttcagaagagcaaaactaagacaatccagggaaatgccatttgagaatttctaactttaaaaaaacaagtaaaatagtgccaagaatattatctaactaaccccaaagtctacaatgtaactcttttattttgataatgctgttctaaccctatctacttcagtcctttcccacccagctggtttaggaatcaaattcccaatgtttcatcactgttaacattactgttttactcttcactttagttcttaaatggcatagtgtcttaaattccctcagcctctttcacatttgatttctttggaaactttttaccttttcattgaagcccatatgatcttttccgaaacagacccttatctttacctccttctttggagtctttctcctacttgaatttctgaacttcttaaaatggccgctttgggttggtgtcagtaattcagtaataagttttcttttctttttttttttttctttttttttgagacagagtcttgctctgtcaccaggctgcaggctgtagtgcagtggagtgatcttggctcactgcaacctccacctcccgggttcaagcgattcccttgcctcagactcccaagtagcaagtagcagcaccatgcccagctaatgtttgtatttttagtagagtcggggtttcgccatgttggccaggatggtctcgatctcttgacctcatgatctgcccgccttgccctcccaaagtgctgggattacaggcgtgtgccagtatgcccagccagtaataagttttcttaagtgctttcttaatattctgatatttttaaaaaagatctggactattttgtcatacaggcaacagaatgttaaaccatttcataaaacaatgacaaatatacatgaatttttcatcagttataaatgcatttcctttataacattgaacatgtttttgcaactgaaataagtacggttttcatttttagaaggcacatgataaagttaaggcagtggttaattaattttttcagattaatttttcagaaaagtgactgtttctgtctattgtcttaaccccaggcatcaaaggattttaatcagaaagaaccgaggaataatttggttattttagtgcctttttttgagacaaagtcttattctgtctcccaggctggagtacagtagtgcgctcatggcttactacagcctcgatctcctggttcaagtgatcctccaacttcactttcccagctaactgggaccacaagtgggcaccacactctctgcaatttattttaatttttcatagaaatggggtctcactatgttgccctggctggtctcagaatcctaggttcaagcaatccttccacctcagcctcctaaagtgctgtgatttcaggcataagccactacactcaccctattttagagctttgtcaagctttggaaagaaaaccatttataatataatagataaattatggatatttgaggcagtttttatcatagtatacatggtaaaccacagcccccctttataatatttgtatttaataaaaatgaaaatattacttttatcttaaacatgttttaacaaagcaagcatatgtagattagcactaattaaaacaaaaacctttgtaatgatagctgttttttatatgattacaaaaaatttactatacaaatttttatcctaatcagtgtgaaaaactgcaaatattagcttatagggctagtcttcagagtcctcttcctacctactactgctaataagccaatgaaaaactctctgatgtgtgtggtggctcaggcctgtaatcccagcactttgggaggccaaggtgggtggatcacttgcactcaggagtttaagaccagcctgggcaacatggtgaaaccctgtctctactaaaaatacaaaaaattagctaggcgttgtggtacgcacctgtagtcccagctactcaggaggctgaggtgggaggatcacttgagcccaggaggttgaggttgcagtgagccaagatcacaggactgcactccagcctgagctacaaagtgaaaccttgtcaaaaagaaagaaagaagagagagagagagagacaggctcctccgctttttcagttcctaaataattttccaatctagaatgcaaaagattctgaaggaagacagttaccatttcagatcggcagaagttgtggctttaatctagactcgaatatgttttacatcaaagggttgcctcaacagtgctcaaacctgcctctctgaaaacatgctgagcacgaaggttacttgaagtcttagcttgagtacttaagagagtgctatggagggattgttgatgagagctgtgtcacagctaatttttctttagtaattaaaggtttataaaaatcttacactgtatattgacaaatttagcaacaaaatgagcttgagaaaaaaatcaaggcctgccatggcatctttgcttttttttcttaaaaaaaaaactttttagaaagattatgcgactgtattatctgtaactactgcaatggtgtaaatcctgatggtataatttgctttttaaagctatctttacttcagtataacttagattaaatttattttaaatttaaatgatatttttctctttgtttattattttataatgtttcccatagaattcacaaaattcattagaaagatttttttttacttccttaggtcattaagattctgatttgtcaatggatttcacataaaccctgtctttccaaaaatatacaaaaaaaaaaaaaatagccaggcgtgatggtgcgtgcctatagtcccagctactcagaaggccgagttgggaggattgcttgaacccaggaagttatggctgcagtgagctatggtcacaccactgcactccagcctgggcaacaaagtgagaccccatctccaataaataaataaacaaataagtaaataattttcaccttgaaaagcttataaatgtatgaaatcacaatgagggtcgctgatatagtttggatgtgtgtccctgcccaaatttggttttgaattgtaatccccagtgttggagatggggcctggagggaggtgattggatcatgagggcagttttttcatgaatggctcagcaccatccccttggtgctgttgtggtgatagtaagttctcatgagatctggttgtatagcacctccccccttgctctcttgttcctgctttcaccatgtgacatgcctgctcccccttcaccttctgccataattttaagttgcctgaggcctcaccagaagccgaacagatgccggcaccatgctttctgcacagcttgcaaagccatgagccaattaaacctcttttttttttttttataaattacccagtctcaagtattctttatagcaaggcaagaatggacttacacagtctcttttgtatcagggagagggtcttcttggtgactccacttcttttctttgtttatgtatccttccagatgatgtatttatttcctttgtttttcaattgatatttactcttaaattaaactaattatttaaaaaagcattttaaagtctcattttagattattttgactatctgatttttaaaatggtttaaaaaatctatcttggcctccatatgcaatcaaataagaaacacattttaagcatattatttaccttgtggattctgccttcctcagtgtgttcagtctgtgtatattcatttctcccacactgtaagaagctagtcagatgtataattggattatcatgctacataatcttagcacactcattttaagcatacatagactagtgagcaccactcattacatgtcatttctctagagaaactagttgggccatggctgcaggactctcacttgaaaagacatgtgtggtgatgttttctcaggcagttaagcaataaagtgtaccctgatttgcactgaaaataaagattcctttaaagggagcagttctagttatctctctctttaggtaccatatgctgaacgtttttctatgcactaaaacagcaactaggttttatactctgccttacagcctacttcacacccatttcacagggagaggaacagagaggtaagtgatttgccccaaattacataactaggaagttatttgctcagtgtggaaacttgttcagaaggtcatttcattgaaatgtaggaagagtttctggcacttctcttgagcaggagtcaaaaacctttttttgcactagcccagatagtaaacattttaggctttgtgggccatatgatctctgtcaaaactcctctacttcgttgttgtagtgcaaaagcagctatacacaatcctgaaatgaatgggtgtggccgtgttccagtacaaccttacagaaaaggcaataggctggatttggctctgagactgtagtttgctgacctcagctcttgaactgagctctttaactgacctcagctcttgaactatggtacaagatcccatggtcctgtttggtacctccatttgccctccttttcactctctgggagcatagctaagttcaaaattgaattaggtacttgtagtaagagcatacttataatcctgggatcttcatgttgccagatattaacctcttgaagtttttcaccacaacctgggcacttttctgatttgctcacttctagccccacctttgggccccttcataagcaaacatgcaggttttccagagagctgtatgctactgaatgcagaaaatttggctcatactggcctatggactatctgctcactgccctgataactattttccaagggagtgggtgccctacctttcctacatgaagttttttgctagtcttgccctaaaaattctaggtatcccttgcttttaggataaatatgtttcactgggaccagctggaaaacgaaaaatagaattatccaactaccactttaaaattggacaaagacttttgttgttgttgttggagggggtggtaaacatcattttagcagaccaaatatacttttggtgaaaggcagcctgttgcaaagacacaacacttggacaagattttgaagccctggttgcctttactactgacttaactacagtatttgcggacttgagcaagttgcttcccttctgtgagcctcaggttattcatctttgaaatgagtataatacctgtgattataattacttatctggattctgcagagaattgaaggagataatgggtgtaaaagtactttagcgcccagcactgctccttatgaaaatgaggaaataattgagatgagtgagccattgaggcaacagtacaaaaagtgctgaaaactcactgcttaaataagcacctcttactgcttttgtggcactttgtagcaatgtttttttttttttttttgagacggagtcttgctgtcttgcccaggctggagttcagtggcacgatctcggctcactgcaacctccgcctcacaggttcaagcattctctgacttcagcctcctgaatagctggattagaggtgcgtgccaccacgcccagctaatttttgtatttttagtagagacggggtttcaccatgttgatcaggttggtctcgaactcctgacctcatgatctgcccgccttggcctcccaaaatgctaggattacagatgtgagccaccgcaccccacctcagcaatgtgtttttattctgactagaaaagtaatgtttggttttgtttggctctttgcttaatatacccataataagggtacctatttgcctttggaccattagttcaaatattattttattaatatggaattactgggctccagaagccatagtcttcttagctgctccctatccccactctcacctcaatttttttttttcacttttgtttttcttctcagggaaaggtttgaggcaaagaatgtcttcttatgatccaaaaccaagcatggtggtgatttattcaccaagagattcctaagtacctgtgtgatggacatggtagaatctttgtcctgagggagctatctagatccattccttctgatatgcagccagtagccacttgtggtaatggagcaatagaaacaacactagttcaagtggaaacgtgagatgagaagtaggaggtggagagaactaaccagaagagggtacccaaataaaccagaaatatgtatgtgttagagaaggggcctattgagcgggtggcagtggcatgtgtggcattacttgctcctgtattctctgctttttacttagttgtggctttggtggtatagtctcaaatctaagttacgtaggtaatattgttatgtatcatgttttggcaatgtagactaaatacttgctcataagagtacaggacaatgaggatagtttggttttgtttactgcatggaaaatgcaggatgtttagtaaatagattcatggcgtagtgagttcactactaaaatcagactctgagaatgggtttgatttaaatggctagtttagaagactgaatttaggccacttgattgagaaaggccattttgggtaattataaaccaccaacattgtgttttgaatgttaaagcttatatttgtcttccagttaccagaatgtaagcttcttgaggagggagagaggagttttcttaatctctgaacctgcacctttcttctgtgcctagcccagtgcctggcaccaaacaggtgctcaatcaatgttgattctatgctaccaacaaaaatgagtccatgatgtttactattcaacaaatgaatacaattttagagtaaatttttactgcttacactacatgtagattttctttttagagatttcgcaatgctgatttatttcaaaataagcttgaagctaagcgacaaagctgaatgatgatttgttttttatttatttttaaatccaaacttacaattttacatgtcattgccagaaaaatcattaaataaattatgatatgcgcatatggaatactttgcaaccattaaatcaaccattaaatactatgcaaccattaaatcaaccattaaatatgttggtatatgcaaatgtgcatataccaacatattatatagttgagtaagaaaagctagtttcaaatgagtatgttaatatcatctgactcttgcaaaaggaaaaccatacatttgaatgtacatatatgcatatgtttatatgtgcatagaaaaagctatgaggggatatacctcaagttgctaaaagtggctccacctggagagggacatggaaaggagttggctaaaaactgaggtttgttatggtatacacccctgcacagtttgattttttaaaaacaatgattataaattacttttattatttataaaaatattatttaaaattttggtactaaaaacagagctccatcaacaggtcaatggataaagaaaatgtggtacatatatacaaccgagtactattcgtcataaaaaaatgagaccctgtcatttttgcaacaaaatggatggaactggaaattattatattaagtgaaataaggcaggcacagaaaggcaaacattgcatgttctcatttaatctgtggaatctaaaaatcaaaacaattgaactaatggatatagaaagtagaaggatggtaaccaaaggctagaaaggatagttggtggggcaggggagggtgaggtgagcatgtttaatgggcacaaaaaaatagaaacaatgaataagacctattatgtgatagcacaataaggtgactatagttaataataatttaattgtacattttaaaataactaaagaggtataataggattgattgtaacacaaagaataaatgcttgagggatgtatacctcattctctataatgtgattagtacacattgcatgcttctatcaaaaattttcatataccccataaatatatacatccattgtgtactcacaaaattaaaaaaaactgtgcattaaagaaaaacaaaaataaaaaccatagttcaagttataaacaaaataaaggtaatttggaggaaaactgtcttcagttatattggatatttgggggacatttttgtatgttagttagcaaagatcacttgaaaaagaagattcttccttctatgattcaagggagcctagcaaaaaataaatgaaatgaaataaaataatacaaagagaaaagattattccataaattctgcttacttatttctggcaaacttgttgacagcacatgtgaccttttggtaaaaagacatttttatatttttagttaagtttcaaatataaattgtttgtgtttttaaaataaattaaatggatgatttcagccagatcattatgaaaacacatgagatattgggttatgcaatgactaacagtgtgtaccttttcttgatatttattcataaactggggaataaaagtacattttggcccatttactccttaaataattttatgtctcccaaggagagttgtaagttgcttgatagtaaatgctatgtattttgtaccttagtgtatatattatgggatttcagcgttagaagagctcttaaatgccgtgttcatagtccaacctgtcttctgatgcttgaaatccccttgcagtaggaaatgcaaagtagagagcagacactcaataatgtagttagtgaattatttagaaagaggcattttgagcccataatgtatgataggtacttctacatttattattttattctttgcagacctgcagaaaactgtaagaaaaaagtttatttcagattcatgtgtttatttgattaatctcttcataggtttcatttttcagctcctgtcagaaaatacagattcttataaggttcaccttttacccataagaataatagtataaaggggataatgtgaaatacaatcacttcacagactgtttcaattaaataagagctcgtagataattcagtccaccacaccccattttacagatgttgaaattgaagcccccaccaaaaggaaaagacttgttcaaagtcacacagcaagtcagtggtgaacctaattaggccccctgccttccattttagtgagattcctgtgctgatagtcatacccatatcaaatcctctttggcagttatagcttgcccacagtaatgtgtcctgaaaaatatgacaattaattaagttggagacagaaccataacctctttataaaaattttctggaaagtttacatgacagtaagtaatatataattagaaaggataattcttatttcatatttatctttttgtttcagaataataaactaagctatctctactcagtccattttaatacaaaaatatttttacccggactgagtttttatgctttttaggaactttgtatctgcctcacttagttaaaatcctagctgcactaatcacttactgtggtgggcagaattctagaatgaccctgaataccttgtccttgtatgattccttcctctttaagtaaggataaaaactgtgaatatgatatcactcccttgattaggctttgttatatggcacagttaactttaagaaaggaccaatcacacaagccatttgaaagcagagggtttgggtattttttaactggtggcagaaagccacgcagagatttgaacattgaggggaatttgaatttgatgtgccagtactaacttgaagatagaggaggctgcatggaaagtggcctttaggagtgatccctggctgacagccagtaagaaaatgagggcctcagacctacagccataaagaattctgtcagtgaacttgaacttggaagtggattcttcctctagaacttccatataagagtccagcctgattgacaccttgattttggacttgtgagaccctgagcagagaatccagttgacttctgacctaaaaaaaaagtcagataataaatgagtattgttttaaactgctaattttgtgataatttgttatgcagcaataaaaaactaatatatttaccatgcaaggcaaggcatttatcctctcatgattcagtttctttttacctgacataatggaattaatttatactgctgtgaagttgtagttgagaaacatgacttctaaagtaatagaggacatgtattattaattttagtagtattaatagtaatgatactgattctcccaggcctatacaaatcctttgatacacaaatgaatagtaaaggaacataaattgtctctaggtagactttcccacaatgcaattttaggatacagaggtcatatgcctgttattctactgtggcagagaaaatatggagcctggaaaactgttcatttgcatcacatacatcttgggagctcactctgaacctggtaccataataagctctgtagacagtataaagaggaaaggaatcagacatggtgtctgacctcaagtgtctcataacgtagtagaagaggtaaaatatgggtcacactaactctactgcaaagtaggaagtgcttgtcgccttgagattgacaaaatttggtaagagttcagaggagattgtctgtgaactgggccttgaagaatagttaggatttgaataggagaaggtgaagaaggaaggcattccagctagggagaagagcacaaacaaaagcatagataaccttgaacatcatcatatgggataattcaatagttcagtataatggaagtataagatgcataaaaataagtgtagtaggaaacaagtttaaaagtatagattggggttagtcatacaaggccttgaatttcaggctaaggagtttagacattaacatttgtttttgaacaaaggggtgaactgatcacatctgtgatttagaaagaaaattctagcaatagtgtagataagggttgatggtaaagtttggaaggtggtgaggcagaggctggagacagggagcacatttaggatagaaagatgataaagagatgatttagaagagttgttttggaaaaggagaagacagaaaatgttttagaggtgtcatagagataaaattggcatggcatggtgcaaggaggtaaagcccaatagctttgtaaggtgctgagatagattgaaatcacagagttaggaagttttagagtcaggattagtaccaagacagcttggctctagatctcatacttaacacttacagtataattctgagagggtgggtaacagcaatagtcagaggaaagaacccttttatacatgatggtacaggaacaacactggcttccaaccccacagctgctctttaacagaaggtcagaagctggggagaaatatgtgtgtgtgtgtgtgtgtgtgtgtgtgtgtgtgtgtgtgtgtgtgtatgtgccatttctgggactaaggatgggaagtagattagttgaggccactgcagtggggtctgcaagttgctagcactcacccgttccaagaggccttaaaggtgttgatctgttccctgggcatcaccacattccacaaattaatgttcctctgagagaatagggtgattcaatttcactgtgcccgaaggttacttttggggttcatgtttgttctaagtctatgctaatgatctgccaactgtctgtttgtcactttctctaacccttagcatgtataaactgatctgttgggaaatgtgtagcatttataggatggtaggatttgtaacatgcgatcacaggactgtttatatagagtccctgggaaggggagagaagagtatttctgttacaaatgtggattctttggcccctcctcaaacttactgaggttcaagaattgacatttataataagcacatatccattttcaataaacatgaaagtttcataccctcttttaatgtttgaaatcctcaaataaattagtcattggtgccagagtatcaaataattatggtacagaatgtatttctctgaatgacaccttctcccagagattctgatatatattcctctgcactcaccctgtttgataattaccagtatatggaccatttacctgaagaataagagtagggtttcctactgttgttgaaaatttgcttgactcttaacaacttgtgtgtgactgtaacaagatcacacagggtaaacaatattagcttattcaaccactggctgaagaaatttaggaaagtgaacacatttttctttacatttctctttgttctgtgagccttttatgctggaatagttttcactgcaggctgttattgtctgcctccagaggagggagttgacctagcagtggtaactggagagtgttttttgaaacctctttccaaggttagttgccaatggcatctttggaacagtgtccttcacttttgtccctcagggaccagtgtgagaatgggaactttatgatctggagctggttaagtgaagtccaaaaataattaagaaagtgtttccttccctgggaatgagttcagtaggaatctcaatgtattgtagagcactaaggactcagcctcaggcatttgcaaaggattcttccagttgcctgtgttacagaggacacagttggcatttccttttggtgttgaggggagatgtgtacatggttgtgagatgactcaccctttttgcttagatagttccactttcattgtggacagactctttggagggccagtttggcatgcacgtgtgtgttcattccatcctggagcattctttatgagaaagccatttgttgagtggtttgccattttgttttacagccactctgtgggctatgaaatggtcatccggccgctttatttgtccctaaaaaaagcagtttttccctttcttatcttcatggctgccaagcagcagaaagagtaactcagggaagccatgtgatagccttttatctgtctgttcagaaactgatgatgtattggatttgataattcatcaaatctgaggtttactggtttgtatttgcctcaaaatgggcatataatattttgtcaggtaacataatagacagatcattggcattgctttattgaagtgaattaattcaataagcctgtaagtgcctgacatgtgccaggcactgtgctaggcattctgttaacagatgagacaaatctctgtcttttaggtgttttcagtcgaacaggggagacaaatatatgagcaaattgctattttttttaaatttcatagtgtacatgagtataaggtgctgaatatgtgattgattctgagggaaaagagagataagggaaagttctcagagaaagtcaagctgagggaagaaaagcaccccagacagagggactagcatagagctatgctagtacattgagtttaagggaatggcacatacttcactgttgcttcagcagacagcaggcctgttaggttacaaagggccttggatgacatgctgaggggttttaaaattttatttaaattttaattgacaaaatataattgtatatttctgtgaggtacaatgtgacgttatgatatatgtatgcaatgtagaatgattaaatcaagctaatttgtatatctaccacctcacatacttattttttggttagaacatttaaaatttattctcttaacaactttgaaatagacaacacattattatcaactgtagtcaccatgttgtgcagatctcaaaaacttctaacaaaaactttttaccctttgaagatattgaactgttttatgaacacaatcttagaaggatttaaaaaataatttgctattcaccaagtacttcttacgtacactgtgcatgaaatgattattactttttctaatattagttttcttgattgaggcttggcaattattagtttgtatgcctttagaaggatcataagcagaggtttatcccagtaggatttgcattttagaatgatgactttgggagtaaaatacagagaagtgaaaccagagatagtgggatcattctggagtctgttgcctacactgaacagtagttgagcgaaaaaggatgggcagaatgtgttggttctgggtattgcaaattcatggcacttgagtgaaaaagtttaagccttctattggctctttgtgaatatcttcaacatgcatgactacaaatagaacacatggttttgttgttattgttgttgtgtttttgtttttttttttatttgagatggagttttgctcttcttgcccagactggagtgcaatggcacgaatttggctcaccacaacctccgcctcccaggttcaagcgattctcctgcctcagcctcctgagtagctgggattagaatcatgcgccaccacacccggctaattttgtatttttagtagaaacagggtttctccatgttggtcaggctgtcttgaactcccgacctcagatgatcctcccacctcggcctcccaaagtactgagattacgggcatgagccaccgcgcccggcccacacggtatttttgaaagaacagtgagcttggattagaacactagtgtccaggccctgctgctactacataagtaattatgaatccatagccatcttgttgctcttcttctctgagccttggtttctttagctataaaatgggaagttgaaactttctagctacttctttgagttatgagtaacaagttaggtaatacacttaaaagagaatgtgctatacaaatactggttcttaagacagctgttgttaatgtactgagtattatgcttacctcacagggttattgtgagcatcaaatgggataatggatttgtaagcattttgtttaaagtgtgattcaaatgttaagaattagtaaaaatagtaaaagaacaattcattctccatccagatgttctgtccccactgtgacttatgtgctcattcagagttgtacagaaaaacctccacttaattttcacaagctggagttccacatgtaacagaatcatatgggaccaaaaaattctctgtattggcttcttccctgccgtattttggctctgggaccaacaagacacccattttgcatgagctgcctgccaccaactttgcgctcacatctagttctgttgcccatgtgcaagctgaatttgggcccgggcccccagatctaacatgaaactcaagtttccttctgttcaaactgtccaggcataatagtcttaaagtccgatgcccagcagagccgtagatttttcactggccaaaaatcaacatgaaaccagatgtatctgtaaatctagtttcataacactttgtagtcaatggaaatacagtagcaggcagaccagaccagagtttactatttgcagtggaattaataaccacatggaaactttgcctttggtatctgcgagatggaagataaaggtgcgaattcaaagcagttcccaccttaccctctaaattccaacataaagaggccttgaatgtccttctatcttattgtatatttcattaacagaagtatgttcctagctacttagtcattctatctctattctcctttgttttaacttcagtggtgccagcttaagatgctctggctttcagctttcatggagcacgtcatgtttttaaacttatctttagggacagaaatgttaggaagatcctagttcctcatctctttgctcctgacaaggaaatttagaattgcctaaagaaaggatgtattggccaacctaataataaatcagtattagtgaatctaaagcatatttgaaaaatttgtaacatgagttgaaattcagacctgcaatgaagtgtttttaaaagatttaaaatcgaaataatataaaagaatgttaaaaacaagtaaaacatatcactagttaatcactctaccaaaattcatttttatgtttgcatatttaaccatttttattttctatatttgtccatgaacatgtgtttttatatattgtttatattaaacatggttttaatcatggcttatttcttttatgttttacttcttttcctttgacataaaatattgtattttttaaattttaattgcttcttggcatacccttccaatattggtggctatatagattgaagttaaaactaattacaatcagagaaaattaacaattcatcccttcaatctcattagtcacaagttaaatactcaatagccacatctatctagttgctactgttttgaatagtacagatataagacattttcatcaacacagaaaattcacttggaaagcattgccctggagtaaatgtgccagactgtactatatcatttttctcttgttggacatctaagttatttcttattttttaaatattttatataacttgacggtgaatatacctatgtacatagctatttgctttggctgaattatttcttagaatcaatttcaaaagtggagttattaggtcaaagagcatgagaagattttttggaacctgcagtgtattgccatagtcctctcaaaaaagtttatgtcaacttaaagtacttctagcagcatatgattgtactaatttcgctgcaatctcaacaacactggacattataagtttttattctaccctattttccattaaaagatagcttatgcttgattgactttgcattttattttattattaataatgatgtggtttccttttttctagattttatttttatttaaggcatcctttgattttaacctgattttttttctctaaaaattattctaagaaaagacaaaggtgatacgaaatatatcctgagtttttatttttttcttgcatgggatttgtatatttgcacctttgcccatttatactatgatttcttagtgtcttccctggcaattttaatgaagacttcatgtatatcaatttttccacaaatataatctttctaaaaatatgttttttccacaatataattcagacgtattctccgaaatgttggaaaaacttaagtaggcatcaaagcatttgaagatttgtttaaaggttgtttttataccagttttaaattgtaatttaagggtcataaaataggtgaaaattaaatcatttttcagtaagggggcaagaccacttaactcttggaaaatacaggaaacgtagatttctagaggccaagaaggaggtagggattattttgtaactgcccccaaccttctaacctgtaatgaaacaaacactgaaggcccttaaacatttttaggcttaattggctgtccttgtacttagggcacatctaaaaatcctgaggcaaccactcaagagaacatgcttttgttaattcaaagggagctgtcctacgagtgtccagaatcctctgtagtcttgggcctggtgcttgagagacccaaaggaaaggtcaatggaattacagcttagtgttagagctttcatgcatcacactaattaattaatgtcataaaggtctctctcctgttatgggaaaaagcagcaaataggaacttctggtagggtgcttaaagttggtttgatattttttattagcatttttaactaatacaagtaatacatgcttatggtagaatgataaaactgaaaaaaaaggtatgaaaatttagaagttctcctactcatgacctcaccccttctttcactcccagtttcactcctcagagggtaaccacagtgactagcttcttgtgtttggttcctgagattttctatgtatatatattgttagatatatgcatggtatgttttcaaaattcctgttacactataattactgttctacaacttaattttttcacttaattaatagaccttatatatgcttttccatatcggtatatatagatctatataagttttcttaaaggttgcacaactttcaattgtatggctgtcttgtaatttactttttgtttcccttactaatggatatttcatgtttccctaactcttttgatattaagagtagtgctgcaattaacatccttgagaggcagtatatatggtgtttaagatgaatggttctggagccagactactttggattgaatattggtgccaccaattccttgctgtatgaccttaggcaagttgcttaatttctttgcctcagtgtccttgtgtgaaaaaatggaggcaataatggtcactatccagtagggcttttatgaggatttagtaagttaataatgcactttaagaacttagttatttttagattaagtagtgaaggactatataattgttagtataattgtatacctttattatcatacttttgcatgtatagcaataagacaaattcttagatgtttaaccattggacataaggaatgtacgcattttaagtactggtagatattaccttttccctgccaaaaattgcaaatattggatattaactttttaaatcttagtaaatctgataagtataaataacagtttatcatcattttaagttgcctatcttaattttgtgtgaaaatgattatcttttcacatgtttttttggccatttatgtttctttccatgtgaactaactgttcctggccattgcctatttgttgttgctgttactatatggcttttcatctgtttcttattggtttatggagctctttgtatatacaggaatttagcctctatttatatgtgtgacaaatactttttccaatttatctttaaaatttgtttatgttttcctattcatcagtctaaaattatgtagttaaattcatcattgttttttcttatgactttagagtttggagatcatgcttcaaaggtctttctaggtggggatgatttaaatcatgtactggaagtatttttgccaaaaagactcacgaattatggatgttagagctaaaagggaccttagagatttcctagttcaaccaccttttcttcatacctttttaatttttctctgcagatgaaaagaagtttagtcctaaagaaagaaaagagtctaaaggttctccagtaagctaatggcaaaaatgtagactggaacttctagctcctgatgtgtatttcagtgatcattcaatttaaccagatggtttcacaaaaagagctttctactaaaaaataaaatacatacttaagcaactcagagaattttttttttatttttcagattaattttcacttagagattcatcagcatatgtactatacatgtacaaatcacctgtgtgttttggatatttagttaaacaaatgtgcaaatattttaaccaaaggagcatattcatttgtgttttattttcttaatggttttcgttatgaatgtgaaatgtgtatttaccttaacagaaattaagtatatttttggtctgacatatatgagaactgaaaagcattggcttggctgctaactgcattctcatctttctttctctgctttggcaaagtctgggattaaatctaataccttttaaactgtttgggacttcagccagagtgacctgtcttgaattcagaactgcgcagatcattccccattctaaggccctctcatgcctcctcattgcctgtaggatgagatccaagtaccttagcatagcttatgcactgtagtcacttgacctctagcacctatgcagtcttccagtcttatttacacattcctttgcacatgctgtttccccgtgtggggcaacttttttcttgcctgtctgcctgcctaagccaacttaaataaacatcatttctgtaacttctgtgaagccttttccaatctctccactccaagacgaaggtgtttctataggcatgacttctggaatggcagatcaaggatctggtggaccctctactcagtgaaacaaccgtttaactagtaaaaatgatcaatcaaccatttaaaatcttcagaaaatatcctaagggcacatagcaaaaagagaaacatttattcaagaaaagctattaagcctcagtaaaaacagcaagagtctatggcatttgagtcatgacctgttcctaatccttcccttatctccattcttcaggcaagtgcaaccaagaagatggaggcttcctctctctcaaaatcttactccatagttataatttcacccacaatggggcagaccacaagcatctcttttttttcccccagccctatattacagaatcactgttctaggaaggcatagcttagaggattggagattccttccacacccactttctacgtatgagggctttgccccagggatggtaagtcaagaatacagggatcctgcttgtgcctgcctcagctcatatataaggtaaagcttccacactaggaaaggcaaattaagaggactagggaatataccgttatccccagggtccacttgtagaacaggggtgtcattctgggagaagcaggtcactgccccacttgtggaacaggggagtcactcgtcactgtccctggttcaaattctattgcagtgacagaggttctgtcccagggaaaggcaggttgttaggatggagaactccacagttctccctgaggtgactgactttatttggaacagagcatgaagaagttcatgcctaagggcactgtcaaaaataatggagatcttggtggtgagcaattaagagtggattggtagctccatgatactagtaacaacaagcaaaacagcagaccagcatggaggataccagagaaccagacaaaggaatcactaagaagagcccttgtggaattgcactcactgctgggtgtgtggaaagttatgcatgtgtgctttactgtaccctctcaaaagcaacctaaacaggatgtggggtaggctctaaagcattcctcaagccacacatggatccatcagtaaaatgtggagggcttaaggataaaaaggcttaagtacaatctctggccctacattttctaaatgttatgccaccctgaccaaggggcaactcctacaaagccaggcaaaataataaaatcatatttgtctctagtggaatggataactatgcctaaaactgtgccctttgaaaagcaactagagagataatttctgaagtgtttgtccctacctgaatgtgtggcaaaattctaaactccctgaagtgtgaaagtggtttccaagccacatgcacatccagtagtggtaaagggtgaaaatctaactggctaagagggcttcatagcaacattaaccaaaaagtggtttatgtagtctttgcctgcttcataattccctaggcattctatgctattctgtactcagaaggcttaaagtcaggttagggaaaggaggcctatgaggttactgtgcagaggcagtgctgggaaataaatgaagttaaataaatttaggccatcgtggtttaaagaatggattgtggagataagaaggataaaggaaacccagagtcaagaaaaataaaacttttcattggtgccatgccaacccatatccgagcctgaggcaaaaggaaaaatgtgctccctgatatacacttatacaaaatatcaactaattttatttgttggactgaatagaaaaagtcaacaaaaattaaaaataaaaaaatcatgactatatttttaataagtggtttatgtaaacccagagttgaccaatgggatgccagtctcaaccataaaaacaaacaaaacattgtgagtaacaacaccagaagtctcaaagtgtcagggaaaccaatttcacagaagcagttcagccaagtcactaaacaaacaaacgactaagcaaaaaacaagaatgagtctcagaaagggtcaagtcagtatccagagttgttacaatatagtatctaaaatattgttttgaactaaaaattttgaggcatgcaaagaatgaggaaagtatgactcatacatggtattatatgaaaaaatcaacaaaaaactatccatgaggaaacaaagatgttgaaattcactagggaaagactttaaaaaccagctatttaaatatattcaaagaactgaaggaactatgtctaaaatactaaaataaagtataataacaatttcttgtcaagtagagaatgccaataaagagatagaagttataaaaaaagaaaaaaatggaaaatctggagttgaaaattataataactgaaatgaaaaattcactagaaaaggtcacaagaagatataacttggcagaagaaacaatcagcaaattagaacatagatcaatatagattattcattttgaagggtagaaagaaaaaaagaatgaagaaaactgaagattcccaaagaaatgtaggacatcttaaagacacatcattaggagaagaaaagaagggaaagaaaagagcagaaagaatattttttaaaaaatggataaaatcttccaaaatttaatgaaaaacatcaacctacacatcaaagaaaatttttttaaaacttcaagcaggaaaatgtaacgatattgatacttagatacatcatagtcaaaatattggagtcaaatataaagagaaaattttgaaattagcaagagaaaaatgaaatggaaccacaataagattaacagctgattctcatcagaaataacagagagcagaaggcagtgcaatcccatattctaaacgttgaaagaataaaaaaactgtcagtcaagaatcatatattcaacaaaactatctttaaaggtaaaaatgaaatgaagacattcctaggtaaacaaaggctgagagaatttttcattagctgacatgccttgcaagaaatactaaaagcttcctagacagtagctttaatctgcatgaaaaaaaattccaataaagggaaatttgtaaataataaaaatacatcattatatattcttttccacttaacttatttaaaatcaatttcttaaagcactatctgtaaaattgtattgttatttgacaataaaatgtaaaagaggggagtgggaattaagctaaattggagtaaggaaatggtatcacatggtaaattgaatttacagaaagaaatgaaaaaattaagtggcaaatatgaagagtaacattaaaaacttctataaattaattgtggcctcctttcttcccttagcttctgtaaaagacataagactattaaaaatgacaataattataaacacattgttttattagtaataaacatagacaaattatctacaacaattattattatacaaggagagggaatggagctgtagaggagtaaagtttttataacctactggaactaagtcagtataaatatgatgtcgattctgttaatttgagatatatgttagaagccccaaagtaatcactgagaaaatgatgcaaaaatacagttttaaaaagttaaaaacatagtttagcttatgtgtgcctagtactccattattatttttttattatattttaagttctggggtacatgtgcagaatgtgcaggtttgttacataggcatacatgtgccatggtggtttgctgcacccatcaatccgtcatatacattaggtatttctcctaatactatccctccccctgtcccctaaccccctcaacaggccctggtgtgtgatgttcccctccctgtgtccatgtgttctcattgttcaactcccacttatgagtgagaacatgcggtgtttcgttttctgttcttgtgttagtttgctgagaatgatggtttccagcttcatccatgtccttgcagaggacatgaactcatcctttttatggctgcatagtagtccatcgtgtatatgtgccacattttctttctgcttgttcccaggagaaagtggctgaagattccagagagaagctgaatgcagtttaattctttttgccataaacacgacaacccattttcctgcaagctgtgttagtttgctctcttcttggttcattcattcatttattcatagcttccataaatatttaacaaacactaattaggggccaagccatgtgctaggcacaggggataaaactgtgaacaaaacaagccccagctactcttaaggaactgatagacaaatggaccagcaaacacgctggtcctgttttgaaggcaaagcgcctggtgctcctgatctcatgagcacagagcatttagcctaagtctcatcctcctaaggcctcagaaataaggccttattttaataagtgcaagtcagtcatttgaagactaaatcatagaatcctagaaaactagtaccgggagcaaggcaaaagaatgggatgagcatgaaacatatattcagaagttgtggtgtgtaggtatataagccaagctcttttcttcacttgcttgctaagtcacttagcttttctgcctttttgtttgctctgtctggaaatggagttaatgaaatatatctacatgatagggatattgagacgattaaataagatgctgctgtcacccagtatgcccttaccctgctgtacttagaagtatatgaaattcattttctaaatttttgtatgagtgtttcatgcatgcccaccaccatggaagctaccttaagacagtgagggactttgtttaacttgtttgtactacatcctcagtctaatggtgtctggcttatggtaggcaccaaatataattttattgacagaaaggatgataatgaatgtgaaggcatttttaagtttatgaagtgttgtgcatattgttgttaattttaagctgttacgttaaagaacccctaatccaactctcttgagttttatagatatcatagaagatatatcttcccttgacatagaagcttcccttgaaggttcccttgactcatgtatttgcctcacagtgattgtgcagatcccacaagataaatttatgtgaatgtgctttatgtgcttgaagtgctccacaaatatgggttttataagatgagaaaatagagtcagggagaaaggtgactgatccaaggtcatgcaaagagttagtgtcagaatttataatggaatttcaggctcccaactcccactccagtatactaaggcagattccagagaagaaacagtggagagcaggcactgatgagggacaaagaaaagcaggctccgtctggctgcaacttgtctcttcatggcaaaaagaaactaggaaagtgctatgccagagacgacatgataactttgcagaatggaaagagcttgtttaccacattgaatactttatctgtgtttatctaacgacagttccaccagctctttaccacttgacttttgcctaattcaaaaatataccaactatgaaacattttccttctcagtttttattctagattacattttgttcaactttatcttaatgtgtagtgtagaaagagtaaggtaagagtatagcaagtggttattttccatttctactgaggacagagaaataatctaagggatttgtattagagatgaagaagtgcatggccaggacatgagagatactgtgatagaatggatattgtgaagtctttggtagtttttgaggggaaaaaagagaaggttttctttgtctgatatagtttagcaacgtcttaatttaggattcaaaagttgttcagggtccatcttggccttcaaattaagatgccctttgagagataacattgttgttttcaaactctgttctgtgacttaagaatgagaggagaaggaagaaaagaggagaaaatttgagggaaaagtgcccaagcagcgtcaaggctagacactggaaatttatcaatgaaagccacatggtggatgggaatcagatatgtgcatcaattatttgtgttccaatccatatagaagtaccgtataatgcaccaagctaataggtgctttgaaagaagaccatacaagtggagatgtgttcctattctatctagggatagagtcaggaagggcttcattgaataagtggtagcctcttgggctgagacctgagttatgagatgatgtggcaaaggagacagatggctgggggcaaggtggggtcattgaaattggaggcagtagcaatataagcaaagctacaggggcatgaaaaagcaaggttagattagtgaattgcaacagggtggtactgctggaaggtcacatggaaaagattgtgaaggtattgagataagaagctagaaataagctttgaatgccatcctagtactttgaatttgcatgctgtaagccaagtggttttcacttggtcatttaataaaattacagattctcaggtctcacctgtaacttcagattcagaagagtctgctaactgaaggtggaatcagtgttccatattgctaattagctcctcagaggattctaatatatcagtgagttatgaccactgctgtaagccataggtagttattgaaagctgctatggagaggagccacagaagcagatgttttagataggattcctctggggtcctgtgtaatttatggactggagaggatcagacaggaagcagaaagacttgaataagacagttgcagttattttggaggcaaagattctctctctctctctctgtgtgtgtgtgtgtgtgtgtaattgtaggaactatttaggcagtaaaattaacagatattagtcactgattgactgagtggatggcagtgataggtggggtgcgttgagggaagtgtattacattaagtccaggatgactcatggttttctaagttgagtcattggggattgccatccaatgtgagaaactatatagtcttatcatagttgatcttggaggtagacttgaattaaaatcttgaagccatcaattgctgtatgtgggtcttgggcagaacacttaaggtttctggacctcagttatttcttctgtaaaatgaggaaaataatgcatacctcatgcatttgttgtaaagactaaatgaggttaaagtatgtagagtgtagtttagtaactgggacgtatagtggtccagtaaacatcagctgttattattgtgctatatgttgtgatgtgtactggagtgagatggggtaggggattttttagtctctgccaatgactcctctccccatgatcaaaatcagaaaatcagtctcttatgtgttgaggagtgagacacttctcccaagtgtttaaggctaataccttgccttgttttgccttgggccagacctcactacacatctgtttaagagatcagggtaagctctgttcttggtgagtatctcaatggggctgtttttctagttcttgtagtttctttgggccaacatgaaatgtctaaccttggcttcttggttgtggattctcgtcaacatttcactgctacccaagttgtgtctgcttacatgatgctatcttccttcttttgggtttctgaagccctcagacacttggctgaacatttttcacatttcttaagctatatcatctgtgttttccctgccacagacaaagtcacaaaaggactttaagataggttttggttttttttttccccagggtttttatacattttgggtaagggcaagtggtaaatgctgcttttctgccttaaccagtagtgtctgacagaggaggtagcatgatgattgcagagctcactggactgaaagtcagatgctttacccgcctagactctagtaccaaggggaagatggagtgagatggggtaaatggggagaaattaccatttattttgagtgtgccaggccttttctcatgtattgtctaatgcatttgtcacaattctctttgggtttgaaatgtgattttcttcattttatagataaggaaacttatgggaagggaggttaggttcatcttgtgcccaactttacatggctagtgatcaataatagtgagattcaaactcagatttctctgccccaaagcctttgctttttcctcttttgacactgtaactaatgagaagatgtatttaactctgagtctcatttgcctcaactgtaaaatggagctctgtaactcttgctctgtatgacagtaaatctcctcagaccagacttatgataggggataaggatatttgtatctttgggcccctaatgtattgaaagtgcttctaagtgcctggcacatagaagggcactcaataaatatttaccacattttccagaaagagggtagctccataatgggtgagatacattttggtggctactgtagtgtttaatgcttttaccatctgttaaaatgattttggagtatagctagataactgatgatggttgttatatagattttttcataggttgcctgttccaaattctatgccgtggaagaagttaaatatccagaatttgacaggaaatattattctacaacagatccctggcgtaagaatgataacacctgtgttctagtctcagacttgcctctgaataactgtttctcctggtcaattctctgtctctatctaggcttgaaatttcccccaaatgatgaaggagttggactagtttagtggggttcagcctcgagtggccattaaaattatttggggatctttgaaaaaaattagatgcccagatttttgtcgttgttgttgttgtttttgtttgtttgttttttaattatactttaagttctgggatacatgtgcagaacatgcaggtttgttacataggtatacacgtgccatggtggtttgctgcacccatcaacccgtcatctacattaggtatttctcctaatgctatccctccctagtcccctaaccccagacaggccctggtgtgtgatgttcccctccctgtgtctatgtgctctcattgttcagctcccccttatgagtgagaacgtgcagtgtttggttttctgttcctgtgttagtttgctgagaatgatggtttccagtttcatccatgttctttcaaaggacatgaacccatccttttttatggtggcctgatattccatggtgtattgaactgctcactccagttcaattaaatcagaatacagaatgttgagaggagcatcagtattttaagaaggccccctagtgaagttcaatgtgcagccaagggtgagaaacactggactagatgattgataagggccatccaactttgatagtcaacaagagacaatgctatagagtatggtggacagagcatgggctttagagttagccaggtatgcattcagaccctggctctgttacttactagttgtgtgatcttgaagaaatcaaaatggagatacactatgtacctggcagtaatagttgtggggattaagcaccttcaccagagcttaggacataataagcccccagtaaatagcttctttaatatcagaagttcagatggaagatgtgagaaaaatattggttcagtaagatttaacaggtaaattaaaatcaagtatttgaaaacattttcctgtttctttagcaatggattccagaaacataatgtggaaatagctctcagtccttagatttgatgacattgcagaaagaaatctggctagtcgtcccatggctgattggctatgatggctagaaagccattggaaaaaaaaaattggctcacagaagacagcagatgtggcttgggaaatgcaaggacatgactgtaataaggatttgtctatccagccccatttatgagagtgattccaggagaaaaggacagatttgtattgtcagtgggatacgctgttaaaaaacacttttgctactaccactccagctgtcttggcatgtttgttggtgatgtaagctacagaaaatggaaatcaccaatagggctatagcaacctgatgcatagtgacaagtaattgttctattcatggttatgtgttgtacagagcacttgctgcatgtcaggtttgagacttgagtatgcattagggccatggacacccccatcttatctttaagtagatttcaaagtaaatatttgatgaatatgtaaaatatttagtttggtcagtcatagggctgagaacatggtggcagttacctcctagtatctgcaagcaaaaaaagttttttcttcctatagcaattgccatctcagccacttttgcagcatttctttttgctacactttgcattaaccatttgtgcacttgtcttagcctcaaacaggccatgaaagctccttgaggataggggctatgtctttttcatctttatatatgcatcatttagcagagctgtccctttataatgtactaattactgaatgaagggatgcatagatgaataaatgaatgaaaagtaggagtgacctgtcttctctctttcttcacgatggggactagtgtgtgtatataaggggataatttttgtgtcacataaaatataaccttacttagaaggcaagacttccagaatggtggaatgagaaccacccccccgcccccataaatccgccctttcatgaaagcagtgaaaacgctagcaaacgttgtgaaaattaacttttccagaactctggaaaggaaacagaggcttccaacaatctgagaagaatgtattcaagaaaaacttcggtaagctctctgatcacagtggaaataataaacaattagtaatagaaggatagttgggaaattcaccatttgtgggatataaacagtggatcaaagaagaaatcataagggaaatgagaaaatactttgagattaatgaaaatgaaaatacattgttccaaaacttacaggatacagccaagctaaagcagtacttaaagggaaatttgtaactgcgaaggcctatatcaacaaagacaaatgatctcaaatcaagaacctaaccttccaccttagactaggaaaggaacagcaaactacaaagaaagcaggaagaaagactaataaagactaaaagggaaataaatgaaataatagagtagaaaaacactagaatcaatgaaattaaacattgattctttgaagagatcaacaaaactgaaaaaaactttagtcagattgaataagaaaaaaagagagaaaattcaaattatcaaaatgagcaatgaaaatggggccatcactacctaccttaaaaagaattttcaaaggattaaaagaaaatgccattgcattagttcattctcacacaactataaaaaagctacctgagatggggtagtttatgaagaaaagcgctttaattgactcacagttccacagtctgtacagcaggcatggatcatgaggccttaggaaatttacatcaggtgaaaggctaaggggcatggaagacatgtcttcacacggcagcaggagagagagcaaagagggaagtgccacacacttttaaaccatcagctctcatgacaactcactcactatcatgagaacagcaaggggaaaatctgccctcatgatccaattacttcctaccaggtcccttccccaacactggaaattacaattcaacgtgcgatttggatggtgtgacacagagcaaaaccatatcaaccatactgtatgccaaaaaattagatgacctagatgaaatggacaaatactcagaaaaacacaaactatctaaagtgaccagtgaagaaacagaaaatctgagtagtcctgtaacaagtcctgtaacaaaactggattagtaattaagaaacttcccacaaagaaaagcccaggttcagtcttcactggtgaatactatcaaatatttaaggaagatttaatccttcacaaattatttcaaaacttggaagaggctggaaccctttccaactaattctgcaaagtcagcattaccctgatgccaaaaccaaagatatgacacaaaaataaaactgcaggctaatatcacatttgaatatagataactttctaaaaatctcaacaaaatgctagcaaacagaattcagcaacaaataaaaagggttataaagggtgaccaagtaggatttatctctggaatgtaaattaacattcaaaaacctaagaataggaggaaactttcttaactttgtaatggacatctctgaaaaacacacagctaacatcatactaaatagggaaagattgaaatttttccttgtaagatcaggaacaagacaaggatgactgttctcaccatttcaatttaccattgtattgtagattcaagtcaaggcaattaggcaaaaaaaaaaaaaaaaaaaaaaaaaaaaaagaaagaggtaaaaggcacccatattggaaaggaagaggtgaaaatatctatattcacagatgacatgatcttatacaaagaaaaccttaaggaatccatgataaactattaaaacgagtaaacgagttcagcaaggtttcagaatacaagattaatgtgcaaaaatcaattgtatttctgtacactagcaatgagcaatctgaaaatgagattaagaaaacagttcactcacaatataatcaaaataccagaatacttaaaaataaatttaacaaaagaagcgtaagacttgtatgctgcaaaccacaaaacactgtggaaagtaattaaaaatctaaataaatagaaaaacatcccttgttcatgtactagaggactcaatattgtcaagatggaaatactccccaaagattgaaggaaatccctatcaaaatactggctgttttcttagcagaaaatgaaaatctgaccctaaaattaatatttaaatacatggaacctaggataaccaaaataatattgagaaagaaaaacaaagtcggcgtacccatgcttcctgattccaaaccttattacaaagcagtggtaatcaagagtgtatggtattggcataaggacaaacagatcaataaatggaatactattgagaatccaaaagttaactcttacatttaagaccaattgactttcaaaagtgttgctaagacatttcaatgaggaaagaatagtcttttcaataaattgtactggaaaaattggatatccacatgaaaataaaagattttggaccacttcaaacctgcaaaaaaaataaaatgatctcatggtgtatcatggatctaaatgctatagagctaagatgataaatctcagaagaaaatatcaaagtaaatctttatgaccttgaagtaggcaatggttttttggctataacaccaaaagcacaagcaataagagaaaaaaaatttttttaaaaaaacccttgattattttattaaaattttgttgtgggtacaaagtaggtgtgtatatttatggggtatatgagatattttgatacaggcatacaatgttcaatgatcatattaggataaatgaagtatccagtacctcaagcatttatcatttgtgttacaaacaatccaattatactcttttagttatttttaaatgtacagtacattattattgtagtcattcccttgtgctatcaaatactatatgttattcattctatctaactatattattgtacccattaaccatccccactcccctgcctcccagctacacttcgtagcatctggtaaccatgatttcctcttatctccatgagttcagtagtttcagctcatggagatagacagaactaattttattagctcccacaaattagctcccatgtcagaacatgtaaagtttgtctttctgtgccaggtttatttcacataacataacgaactctagttccaaccatgttggtgcaaatgacaggctctctcttttttttttttttttttttttttgagatggagtctggctgtctcccaggctggactgcagtggtgcaatctcagctcactgcaagctccgcctcccaggttcatgccattctcctgcctcagcctcctgagtagctgggactacaggcacccgccaccatgcccgactaattttatatatatatatatatatatatatttattattattatactttaagttttagggtacatgtgcacaatgtgcaggttagttacatatgtatacatgtgccatgcaggtgcgctgcacccactaactcatcatctagcattaggtatatctcccaatgctatccctcccccctcccccaccccacaacattccccagagtgtgatgttccccttcctctgtccatgtgttctcattgttcaattcccacctatgagtgagaacatgcggtgtttggttttttgttcttgcgatagtttactgagaatgatgatttccaatttcatccatgtccctacaaaggacatgaactcatccttttttatggctgcatagtattccatggtgtatatgtgccacattttcttaatccagtctatcattgttggacatttgggttggttccaagtctttgctattgtgaataatgccgcaatgaacatacgtgtgcatgtgtctttatagcagcatgatttatagtcctttgggtatatacccagtaatgggatggctggttcaaatggtatttctagttctagatccctgaggaatcaccacactgacttccacaagggttgaactagtttacagtcccaccaacagtgtcaaagtgttcctatttctccacatcctctccagcacctgttgtttcctgactttttaatgattgccattctaactggcgtgagatgatatctcattgtggttttgatttgcatttctctgatggccagtgatggtgagcattttttcatgtgttttttgggtgcataaatgtcttctttttagaagtgtctgttcatatccttcgcccactttttgatggggtcgtttgtttttttcttgtaaatttgtttgagttcattgtagattctggatattagccctttgtcagatgagtacgttgcgaaaattttctctcattttgtaggttgcctgttcaatctgatggtagtttcttttgctgtgcagaagctctttagttgaattagatcccatttgtcaattttgacttttggtgttttagacatgcttttggtgttttagacatgaagtccttgcccatgcctatgtcctgaatggtaatgcctaggttttcttctagggtttttatggttttaggtctaacgtttaagtctttaatccatctcgaattgatttttgtataaggtgtaaggaagggatccagtttcagctttctacatatggctagccagtttttccagcaccatttattaaatagggaatccttgccccattgcttatttttgtcaggtttgtcaaagatcagatagttgtagatatgcggcattatttctgagggctctgttctgtttcattgatctatatctctcttttggtaccagtaccatgctgttttgattactgtagccttgtagtatagttagaagtcagggagtgtgatgcctccagctttgttcttttggcttaggattgacttggggatgtgggctcttttttggttccatatgaactttaaagtagttttttccaattctgtgaagaaagtcatcagtagcttgatggggatggcattgaatctataaattaccttgggcagtatggccattttcacgatattgattcttcctacccatgagcatggaatgttcttccatttgtttgtatcctcttttatttccttgagcagtggtttgtagttctccttgaagaggtccttcacatcccttgaaagttggattcctaggtattttattctctttgaagcaattgtgaatgggagttcactcatgatttggctctctgtttgtctgttattggtgtataagaatgctgtgatttttgtacattgattttgtatcctgagactttgctgaagttgcttatcagcttaaggagattttgggctgagacaacggggttttctagatatacaatcatgtcatctgcaaacagggacaatttgacttcctcttttcctaattgaataccctttatttccttcttctgcctaattgccctggccagaacttccaacactatgttgaataggagtggtgagagagggcatccctgtcttgtgccagttttcaaagagaatgcttccagtttttgaccattcagtatgttattggctgtgggtttgtcatagatagctcttattattttaaaatacggcccatcaatacctaatttattgagagtttttagcatgaagcgttattgaattttgtcaaaggccttttctgcatctattgagataatcatgtggtttttgtctttggttctgtttatatgctggattacatttattgatttgcgtatattgaaccagccttgcatcccaaggatgaagcccacttgatcatggtggataagctttttgatgtgctgctggattccgtttgccagtattttattgaggatttttgcatcaatgttcatcaagcatattggtctaaaattctcttttttggttgtgtctctgcccgtctttggtatcaggatgatgctggcctcataaaatgagttagggaggattccctctttttctattgattggaatagtttcagaaggaatggtaccagttcctccttgtacctctgatagaattcggctgtgaatccatctggtcctggactctttttggttggtaagctattgattattgccacaatttcagatcctgttattggtctattcagagattcaacttcttcctggtttagtcttgggagggtgtatgtgtcaaggaatttatccatttcttctagattttctagtttatttgcgtagaggtgtttgtagtattctctgatggtagtttgtatttctgtgggatcggtggtgatatcccctttatcattttttattgtgtctatttgattcttctctctttttttctttattagtcttgctagcagtctatcaattttgttgatcctttcaaaaaaccacctcctggattcattaattttttgaagggttttttgtgtctctatttcctttagttctgctctgattttagttatttcttgccttctgctagcttttgaatgtgtttgctcttgcttttctagttcttttaattgtgatgttagggtgtcaattttggatctttcctgctttctcttgcgggcatttagtgctataaatttccctctacacactgctttgaatgtgtcccagagattctggtatgttgtgtctttgttctctttggtttcaaagaacatctttatttctgccttcatttcgttatgtacccagtagtcattcaggagcaggttgttcagtttccatgtagttgagcggttttgagtgagattcttaatactgagttctagtttgattgcacggtggtctgagagatagtttgttataatttctgttcttttacatttgctgaggagagctttacttccaactatgtggtcaattttggaataggtgtggtgtggtgctgaaaaaaatgtatattctgttgatttggggtagagagttctgtagatgtctattaggtctgcttggtgcagagctgagttcaattcctgggtatccttgttaactttctgtctcgttgatctgtctaatgttgacagtggggtgttaaagtctcccattattaatgtgtgagagtctaagtctctttgtaggtcactaaggacttgctttatgaatctgggtgctcctgtattgggtgcatatatatttaggatacttagctcttcttgttgaattgatccctttaccattatgtaatggccttctttgtctcttttgatctttgttggtttaaagtctgttttatcagagactagaattgtaacccctgccttttttttgttttccatttgcttggtagatcttcctccatccttttattttgagcctatgtgtgtctctgcatatgagatgggtttcctgaatacagcacactgatgggtcttgactctttatccaatttgccagtctgtgtcttttaattggagcatttagtccatttacatttaaagttaatattgttatgtgtgaattttatcctgtcattatgattttagctggttattttgctcgttagttgatgcagtttcttcctagtctcgatggtctttacattttggcatgattttgcagcggctggtaccggtcgttcctttccatgtttagtgcttccttcaggacctcttttagggcaggcctggtggtgacaaaatctctcggcatttgcttgtctgtaaaggattttatttctccttcacttatgaagcttagtttggctggatatgaaattctgggttgaaaattcttttctttatgaatgttgaatattggcccctactctcttctggcttgtaaagtttctgccgagagatctgctgttagtctgatgggcttccctttgagggtaacctgacctttctctctggctgcccttaacattttttccttcatttcaacttttttgaatctgacaattatgtgtcttggagttgctcttctcaaggagtatctttgtggcattctctgtatttcctgaatctgaatgttggcctgccttgctagactggggaggttctcctggataatatcctgcagagtgttttccaacttggttccattctccccgtcactttcaggtacaccaatcagacatagatttggtcttttcccatagtcccatatttcttggaggctttgctcgtttctttttattcttttttctctaaagttcccttctcacttcatttcattcatttcatcttccatcgctgataccctttcttccagttgatcgcattggctcctgaggtttctgcattcttcacgtagttctcgagccttagttttcagctccatcagctcctttaagcacttctctgtattggttattctagttatacattcttctaaatttttttcaaagttttcaacttctttgcctttggtttgaatgtcctcccatagcttggagtaatttgattgtctgaagccttcttctctcatctcatcaaagtcattctctgtccagctttgttccgttgctggtgaggaactgcgttcctttggaggaggagaggcgctctgctttttagtgtttccagtttttctgctctgtttttccccatctttgtggttttatctacttttggtgtttgatgatggtgatgtacagatgggtttttggtgtggatgtcctttctgttttttagttttccttctaagagacaggaccctcagctgcaggtctgttggagtacccggccgtgtgaggtgtcagtctgcccctgctggggggtgcctcccagttaggctgctcaggggtcaggggtcagggacccacttgaggaggcagtctgcccattctcagatctccagctgcgtgctgggagaaccactgctctcttcaaagctgtccaacagggacatttaagtctgcagaggttactgctgtctttttgtttgtctatgccctgcccccagaggtgaagcctatagaggcaggcaggcctccttgagctgtggtgggctccacccagttcgagcttcccagctgctttgtttacctaagcaagcctgggcaatggcaggtgcccctcccccagcctcgctgccaccttgcagtttgatctcagactgctgtgctagcaataagcaagactccatgggcgtaggaccctctgagccatgtgcgggatataatctcctggtgcgccgttttttaagcccgtcagaaaaacgcagtatttgggtgggagtgacccaattttccaggtgccgtctgtcacccctttctttgactaggaatgggaactccctgaccccttgcgcttcccgagtgaggcaatgcctcgccctgcttcggctcacacacggtgcgctgcacccactgacctgcgcccactgtctggcactccctagtgagatgagcccgctacctcagatggaaatgcagaaatcacccgtcttctgcttcgctcatgctgggagctgtagacctgagctgttcctattcggccatcttggctccagaaaaaaaaattgttaaattggacttcatcaaatttgaaatttttgtgctgcaaatgataccatcaagaaagtgaaaatctcacccacagaatgagagaaagtatttgcaaatcatatatctgataagggtattgaatttagaatatataaagaactcttgcaactcaatataaaaagacaacccaattttaaaatgggcaaagtatttgaatagaaatttcttgatagaagatatacaaatttaaaaatgctcaacatcattagtcattagggaaatgcagatcaaaaccaaattgagataccggtttacacctattaagatggctatagaataaaagaacaaataacaagtattggctttaatgtggaggagccagaacccttatatattgctggtaaaatgtaaagtcatgcagccctttgaaatacagtctgcaagtctttaaaaaattactatttgttatttggtttttcttcacttttaatttaggttcagaggtacatatgcaggtttgctatatagctaaattgtgtgtcacaggagtttagtgtacacattatttcatcacccaggtaataagcatggtacccaataggtagtttttctatcctcaccctcctcctaccctccaccatcaagtaggccctggtgcctcttgttcttttctttgtgttcatatgtactcaatatttagcttccacttatcagtgagaacatgtggtatttggttttctgttcctgctttagtttgcttaggatactggcctccagattcatccacgttgctgcaaaggacatgatctcattctttttgcatagtatactatggtgtacatgtatcaaaaatgttactgtttgacctagtaattctattccaaggtaaatactcaagagaaatgaaaacatgtccacacaaatacttgtacacaaatgttcattgcagcattatttataatagccaaagagtggacgacaaatgtcttccaaatgtgggctccaaatgtccaccaactgataaatggaaaaacaaaatgtggtatatccatgccatggtttatctgtcaataataagaaatgaagtactcatacatgctccaacatggatgaaccttgaaaacattatgctaggtgaaaaaagcaactcacaaaagactacactgtatgattttatttgtattaaatgtccataaaagaaaaatatttagagatagaaaggaaattagtttttccagggtctgggaggagacagtatgaggagtggctgctaatgggtacaggatttctttttggagtgatataattgctctaaaattagtttgcagtaatagatgtgagtatgctaaaatgggtgaattttatagtatgtgaaatataactcagtaagcccattaaaaacaacctaattaaattaaaaccaagctataacagaaatattatatggctttggcagtttagaatagtgggaaaatatggagtaagggtggggaaatagtcccaagtataattctggttttgtcactactagtgtatggacttggacaagtcatttgctttctctaagtatcagtttgcatatatgcaaaatagaggtaatgatacctacctcagtggtaccttttcaaaaccttgttcttcctcatctctcctctaccactttctcataatattattacagtaataaccatttattaagcactgtgtccgcagtggtgtggggctgctttacctccacaacttcactgaatcctcactgcagtcttgtgggatctttatttctttgcccattttacatgtaaataaattgaagtcaaatgagttgttcaaggtccttctgttagcaagtggcagagatggacatgaaaactagatcttctacctatgtgtctttccacttcaactaaagaatttattaaagagaattgaaaagctatgaactaaatttcggtaatacttttaatagtaaacattgctgccctcgtgaatgaacacacactaaatttcaaatctcacggtggcagggaataaagatgctacctatcttaagccattacttcaccaacttctccaccaaaatattccttgtaaccacaaataagtaagcacaatagatctataaggagagaataattgtgaactctgattttatcttaaaaagtcatgtagggatgtcatgttccacaatgtgattaataaaatatattttgttactaaacacaaggaaaaatattatgttccataaagatgtttggtggttgcctcgacctcttttagtttgaaaagtaggtatgtatgagaaagatatgtgtttacatgtttacccttgccttctctctgtctcttcccctctctctccctccctccccaacccctatgccctacacccccgcaacccccacatgtatttacctttctctaaaagctctgcatagccaagaaaagtgctcttttttatttttaggatattagatatttcattttcttatggtaagacaaaagattaaggcaaccaagacttacaatgtgcctaccatgtggcaggcacagaggcaagggcttttacatgttatttaatgtaattgtaattctcacaaaagccgtctagagttgaaaatatttccaactctaaatgaggcaaatggagcacagagagccttaattatttcacccaaagttcagtggtagaggcaggattccaacccaggtctggtgggctccaaatccttgttgggttgccattcctcttgctaacaaataaaactggtctgtgacttttgcatttcaccccgcttccacagtcactggtgggacttacttaagttaatcagattcttcaaagtatccccaagtcctcctttgaaaagaaagttgggggacaggaggaggagcagaggagaggagataaaaaggaaaggagtcagggagagagagagagagagagaaacctggtgatctcagctgggtgccaaggtttcctaagcccaagttccccatggttgagcctgtattgtcaggccaacagcttctagtaatccacttttatttaattaatagtgaaactgttgaagaattgcaagtggtgttctggttcagaaaccttccgttctatggggcactgcttttgcttcagattcataaaaccaaatgctctgcctcaagataataagtgaacgtgtaaccctcgggaggtaagaaaaaacacaatgtcacgtgcaaattctgcacttgttctcaaagcaaacctctcctgtgtttgcaattaggatgttatctaggagcatattcaaaacttttgaggtttttattttagtttttctttcattatgtgctgttttagtaatatcaaagaatacatgtaatatataatttatatgtcataacaataaaattaatgttgatgagcccagattaaagaatcaacaacattaacatcatgattgcatcaaccctattagaatggaagctctgtgaaggcatggatttttgtccattttgttcactgctatatccccaggacctagaggagtgtcagccacataataggagcttagtcaatattttaaaaataagagcataaatctacttatatcctctttcctcttaccatcactcccagcctcccctcagaggtaaccactatcctatatttgggctttattattcccttgcattttgataagttttcacatgtatattcccaaataatatattgcttgcttttgcttctttttaaactttatataatggaatcatattgtatgtatcctattgtgaattatgtcttttacacaacattagtatttgagattcaactatgtgtagctcgattccattccttttcattgctgattgtagtttattggatatgtgtgccataaattatttttctcctgtcagttaatgtttatcatttatgctttaataaacaaaactgctatgactgttcctgcatgtgcctcctagtacatatgtgaccaactttctctaggatataagcctgagagagggactgcagttggaatttacatttccaaagcccaaagtttagctcatgagtcagagctgcaatgtgccctttgtccacactaggtcaggatcagtgggagtgctacccaaaatattttgctagctggggagtcagggagaagcagagactgacctagtgaggccaggaggcactatctcaggtctctagtcaaaatgggttgcaattagtaaaagtccagattctgaatccccttcactatttatcttcctcttcctcctttacagttatttttgttcaaggtgcactttattaaactcatgcctaacaaacaaaactctaatgaatattttgtctttcattgattgtaaattcaattaattagattgcttgaaaaaattttaactgtattttcactttagtatggatgaaaatttcgatttctttaaaaaacattttttaataataacacaacataaagtctaccctcataacaaaatttaagggcacaacaccatattgttttttttttattttattattattatactttaagttttagggtacatgtgcacaacgtgcaggtttgttgcatatgtatacatgtgccatgttggtgtgctgcacccattaactcgtcatttagcattaggtatatctcctaatgctatccctcccccctccccccaccccacaacagtccccagtgtgtgatgttccccttcctgtgtccatgtgttctcaatgttcagttcccacctatgagtgagaacatgtggtgtttggttttttgtccttgccatagtttgctgaggatgatggtttccagcttcatccatgtccctacaaaggacatgaactcatccttttttatggctgcatagtattccacggtgtatatgtgccacattttcttaatccagtctatcattgttggacatttgggttggttccaagtctttgctattgtgaatagtgccgcaataaacatacgtgtgcatgacaacaccatattgttaactgtaggcacaatgttgtacagcagacgtctagaactttttcttcaggcttaactgaaactttatagccattgaacagcaacactccatttccgtttcttaaaggtcctttacaaaatgagctttctgcgtgtttccattttgtttatctgataacttttttttctttttttattatactttaagttctggggtacatgtgcagaatgtacaggtttgttacataggtacacacatgccagggtgtttggctgcacctatcaacctgtcatctacattagatatttctcctaatgctattccctcccttgcccctcacccctcactggccccagtgtgtgatgttccctagcctgtgtccaagtgttctcattgttcaactcccacttttgagtgagaacatgcagtgtttgattttcttttcttgtgttagtttgctgagaatgatggtttccagcttcatccatgtccctgcaaaggacatgaactcttccttttatatggctgcacaatattccatggtgtatatgtgccacaatttctttatccaatctatcattgatgggcatttcagttgttccaagtctttgctattgtgaatagtgccacagtagacataagtgtgcatgtgtctttatggtagaatgatttataatcctttgtttatatacccagtaatagaaatgcttggtcaaatggtatttctagttctagatccttgaggaattgccacactgtcttccacaatggttgaactaatttacactcccaccaacaatgtaaaagcgttcctatttcttcacatcctctccagcacctgttgtttcctgactttttaatgatcacgattctaactggcgtgagatggtatttcattgtggttttgatttgcatttctctaatgaccagtgatgatgagctttttttcatgtttgttgaccgcataaatgtcttcttttgagaagtgcctgttcatttccttcacccactttttgatggggttgtttgtctttttcttgtaaatttgtttaagttcattgcacattctggatattaattaacctttcgtcagatggatagactgcagaaattttctcccattctgtaggttgcttgttcactctgatgatcgtttcttttgctgtgcagaagctcttgagtttaattagatcacatttgtcaatcttggctcttgttgccattgcttttggtgttttagtcatgtagtctttgcccatgcctatgtcctgaatggtattgcctaggttttcttctagggttttcatggttttaggtcttacgtgactcatcttgatttaatttttgtgtaaggtgtaaggaaggggtccagtttcagttttctgcatatggctagctagttttcccaacaccatttattaaatagggaatcctttccccattgcttgtctttgtcaggtttgtcaaagattagatggttgtagatgtgtggtattatttctgagacctctgttctgttccattggtctatatatctgttttggtaccagtaccgtgctattttggttactgtagccttgtagtatagtttgaagtcaggtagcatgatgcctccagctttgtgcttttggcttagaattgccttggctatgcaggctctttattggttccatatgaaatttaaagtagtttttttataattctgcgaagaaagtcattggcagcttgatggggttagtattgaatctgtaaaacactttgggcagtttggccattttcatgataatgattcttcctatccatgagcatggaatggttttccatttatttttgtcttctcttatttccttgagcagtggtttgtaattctccttgaagaggtccttcacatcccttgtaagttggattcctacatattttattctgtttgtagcaattgtgaatgggagttcactcatgatttggctctctgtttgtctgttattggtgtataggaatgcttgtgattttcgcacactgattttgtatcctgagactttgctgaagttgcttgtcagcttaaggtgattttgggctgagagaatggggttttctgaatatacattcatgtcatctgcaaacagagacaatttgacttcctgttttcctatttgaatatcctttattgctttctctttcctgattgccctggccagaacttccaatactatgttgaataggggtggtgagagacggcatccttgtcttgttctggttttcaaagggagtgcttccagtttttgaccattcagtatgatattgggtgtgggtttgtcataaatagctcttattattttgagatatattccatcaatacctagtttattgagagtttgagcatgaagcagtgttgtattttgtcgaaggccttttctgcatctattgagataatcatatggttttgtcattggttctgttgatgtgatggattatgtttattgatttgtgtatgttgaaccagccttgcatcccaggggtgaagcggacttgatcgtggtggataagctttttgatgtgctgctggattgggtttgccagtatttttttattgaggatttttgcactgatgttcatcagggttattggcctgacgttttctttttttgttgtgtctctgccaggttttggtatcaggatgatgctggcccataaaatgagttagggaggattccttctttttctgttgtttggaatagtttcggaaggaatggtaccagctcctctttgtacatctggtagaattcatctgtgaatccttctggttctggactttttttggttggtaggctattaattacttcctcaatttcagaacttgttatagttctattcaggtatttgacttcctgctttaggcttgggagggtatatgcgttcaggaatttatctatttcttctagattttctattttatttgccccagaggtgtttatagtattctctgatggtaatttgtatttctgtgggatccgtggtgatatcccctttatcattttttattgcatctgtgattcttctctcttttcttctttagtagtctggctagtggtctatctacaaaatagactgtttatctgatatttattttgtaattatctaataataaccatcattatcatcatcagcattatcattatcatctcctttacccatacatacatttgtgtctttcaaataataatcccatctttgaagtgcatcctcatctttagcagtctgcactctgctttcttatatcatttattatcttattttataattatttatttccagtccttcttctctaacagatagtagtttcttagggccaaggaaatatctcgatcaccactatatccccagcacctaaccctgtgcctggtccatagggccagatgctaagagttgagttgaaccattgtacctaatcttaaccttcattagcacaacatggtttgtcagtggttaagaatctacactttggagtcagactcacccaggatggaatcctggcattgccacttattattaatagatgcgtgatcttgaacaagtttacttaattgttctgagcatcagtttcctcttctgcaatatagggatgatacacagctacctggtaggttgttgggaaaattaaatgggatgatatgtatgaaatggcctggcatatagagtgcctaaatacatgttcttctgattctatttggacagtttgtgttagtaacagaagtcaaaaaggtggagaaaggagaaaggtacttgtgaaaattttctatttcttctccatgtttcattcaggactgaggaagggggcacagtttttacccaaggaaatgacatttttagccaaaagaaatgatcttagcatttagctgaattatatattggaagtaagctccttccatgtggaacttatggccttgctagccttggtttgttggaagtgctcttgctggctttctagttagggtagggaaaggaaggcttgtggggaatgaagataggccatgatatcaagccactgggtttgcaaatcagtagaattttttattgctttctgttgtacttgggacttgaataaaggctgatatttgtgtcttgctggtaaagtgcttgtaaagtgagtgaaagttttctttgctcttgtcctgacatagctgttcacttggggttgaggggaggataacctttcatgttttttttttttcttcattctgatgactgtgctgaacattcaaaccaaaaggccattggtggaaagtaaaggtgagtggtgagaagacaatagggtaatggaaactgtgttggacttgtaatcaaattgtcctgcacttcccctctccaagtcttaacgtttttcatctgtacagtggatattaaaatgagaaaataagcttgtcttcacagagttttcgttaggtgttgacacaacaaacaggctcccattagggctcattttccttcattccttagtaaggaagaagtgcttataaaatatagcagttgtgctcttgtgaatgatagcatgggcagttgtcatctccctgaagcagatgtaacccagaatgtcacttgagttttgtttaatgcttaggcataagacataggaatgacaaaagctgacctttgggtagtgagaacaatgttccattttgttcaaacttgaattttttactataggagactgagaattaaccttccatgaaggttttaggattggctttctggcccttctccttcatatccacctgaaagagcttgggcgcagaagttcttgcagaaaggcagttagacaaggtgacttctgaagctccagtggccaagtattttgatggtagcctaaaagatgtccagaatcattgtacatcattttttcaacagaagcttcaggcatagggattatgcttggtactttatgttgtggaatggaatctggcggatgtccatgtgatctatagaaacacctaaggaaagtgaagaaatgagggaaaaaaaagaacaagacttttatgataatactaatcacgatccttgtgtatttattccaatggcattttatccattatctgatttatattaccactcacagcagcagctcaataggatgggagatattatctctattttatagatgagatttgaggctcacgaagctaaagcaaggaacatcaaatcactttgatatttggtctggttttgttataggtctccctttggatgaggtaaagttacaaacctgggttcatatcatttaattagtctgaaaatgttgcctggacaccaccttcagttagatatcttaacctcaggcttcctgccttcattgctcccgcatatagacatagactatgagattggctaatcccagagaacttccctaatcccttggcaagatccaaaaaggctcagtcacaccctacaaccatcatctttaggagaagtctcagaaaattcagcttcacactaactaacttgagcaatgaataatagtcatttatgcctgcaggttaatgctgaagacctgagacttcacttgcctatttctgccattcagtgacatgtgttgcattggttttttgtgtctttccagtttggagactgccagggaccatgttttgcccattgactattactttccaccccagaagacctgcctgatctgtggagatgaagcttctgggtgtcactatggagctctcacatgtggaagctgcaaggtcttcttcaaaagagccgctgaaggtaaagggtcttgcacatgcacttctctttccctttctcctttaccttccagagagagacactaacctttcagggcccaggattttatcatctcagaaatagagtcattggcaaggccctatcaaataacttaggagcctaaggaagcaaatttttgtacttgctagttccctggtttcagcagccttgtttgtacaggcaatttaggcagtgaaggtggtcccagctggggcttggggctcagtgggtcctagaaatgaaagaaaaattaatgatttgaaaagatttaatttcctcccttcttgttttctactctgctggctagtaaaggaaaaatttgtccttattagagaggttagaagtggagaaaccccaactgagtccccagcctgttccttgggatgaatatgagactgttccttagcaaaggcttcctggcctcggccccagaaagggagtgttctcactcttcagcagactatcagtctctgcacctgctccctcctgttgtggcctccttgggacctgtctttgcattaatagttcctaggtaggtaagaactcagagtgaagaaacacatttattctcctctccagagacctgatctcaaagcctgtccattagtccctaaccttaatctaaggtagcatcttatatctggctaaattggctcaagccctagctccttagttttatttagcttagaacaactcatgtctgctcaacctctagaggcgctcagcccacattctgcagtagaaactcccattttcaggcctcttatatacggtaatgtctccttcctctaaccacccagggcttaagcttcctgcttatccacttcaccctgtattgagggctttcttctcaaagagacattgatgaggagcccctagagagagatgctgtgctctgggaccagaccccttgttaaacaccagtattcacctctgccccaactttccccaaagaggtacttcctgccaaggcctttctctttcctctcactggctggaagtgttgagttccacttcagaaccagaacagagaacctttccttctataagagctataaaccttgagaacagtcttaaaacataggtatgtaggccacaccattcaccacgaatgtactgatactcatcagaatatggaagaagcaccagagagtttgaagcatctagagaaaaggtagaaagagaatgccctttaactgacctcctcagtgatagccaatcacaatgatgagtgttgattcatcattttggctaggtggcagaaatatctataaaacagaagctgccatgttgttttcttccagtcctcagggcctacaagaaggcagctatcatttggtattactgaaaacatgccccatgttcagctcatacccccaaattacccattgctactgtttatgctgggctaatatgaagcccagggccctaatgtctaggtctaggcagtaaggcctagagcagtgcctaaagagcctgagagcagtgccttcctttcttcagagtactcatgaaaggatggctgtcagaaaaggaaatgaggatgggttccagagacttcagaccaccccaacttccccagtgagaccctggcacctccccataccctctcacctagcgggccctgtctatagagcagagaatgaaacagagcactcatctagaggtagtgtgtcagcaagcccaggcactgcaccacagtaatagcagccatatcagatgggaaaggagttcaagtgaacaaacaagcaaattcaatagtcagatagattagattatacttgatgcttcctctgagttttacaaatatgggtcactaaattgttattttcagaaaacaggggaaatgctcaatcacattgtgaaagggaagattttgctgtcatatcatacatcccacatgggagctttctgcagaagttagagctgaaggagggaggcaggcagaagggcaactggcagggctgcctgggaggagctctgcaatgaggtggatcctgtgccatttgagaacagggaagaaaagaaatgaggttttggggagggaatcacccaactcacagaacacacagaaatccagcaaggtttcaaaacgctctacaccttagagtctgttaagttagggaaactctgtgagctcatagggccaaatgcacttgcctgcttgaaatatgaaaaatcagcaatggattccttgaaaaacaatgaaaagggaaccttctgagccccttggttattttgacatatggaccatagatttcagtcctgagccctttgaaggtaggagaaggtggtttagaaaacacacacacacacgcacacaaacacacaccagaatgaagcaaaaaaaaaattactggtgttttctttctcctcccatctgtgaagctgttggattgattttactgccatcattatccctgtttgaaggcagggggctgtcttattacccaaagaggacatttattgatttggttttctttttccatttttacaatgcatctttatcgcccatatggcctttctggaggtggttttcagtctggcttgttgaaacatcaaattatacctgtcttagagaaaatagaaacaaaaatctttctcttccttacttgcttgttgtagtcagttaactcggactgagtattcagagtcttgattatcacttaattcatagtttcataaatctctggaatgggcataggtacaggacttaaaagcctggcatctcagacagaaatatgtttttagctttggtggtttataacagatgggacttttaggctgtcattggtgcagggctcagcacagagtcagttgtaatctggacaggttttgttgttgaggaagagtgggaagagggagtcctacattttctccttgtcagtaatgttggagaattggggtgagggtgaggctgggcagggagggtctgcatagaaaaaagggtgcggtgagaaaaaataatgctactaagccatgagggtaaaatgaccaaattctggttgagagaaacttggtcaaagtgtgtatggggagagaaagttggtcaaagtctgtgtctgagtgcttggtgggatgaactctgggttagaaacaggcatggagggaaatagttggtttatggagtgggtaggatgagtggggtggtgaaagggaaggcattttggatgctaagagaccaggaagtcaaagcaaggcaatacacataaacagaggtaagggctcagagaggttttagttgtgtagacttggataagaaattttcccttttggacctcagttttccttgtttgtaaaacaacggacttgaactagatattttaaaatgtgcttccagcttagacattttgtgaccgttctacaaattacaaacataatcatcatcatttcagcaaactcacatgtatttatacctgcataagtttttggtcttgctttcctagaaggtgactaatcccagatcctaatcaattaaagaagcaatcttcagatggggatagagccagctgagagagtgtactatggatggagtgagttaaaactcaggactcagattttctccttgtgatcattgctgggtaacttcctttcttttctattttctcatctggaaaatcaggatatgaatccccatctctacctcattatgtttcaaagagggttaattaatccatcatgtgcattatgtgctcaagaatttactatttttcagacattttctagtaaaacattgaagattatatgtccatttgttttgtacacatggagtgctgtttggtacacatcataaaattgaaactgtagtttacattctgaactcaaagaattacaccatcctcactgatgtttacaataggtcccaatttagtttctttagcaaattttatgtaagtatggctttgattctctctctcactccaggtttttgttagggaagaaatgcaagtgaaccctcattgaactctttctgtcctttaaatccattctttcccacctcaactcatgtggaattgaatgttgcctctagtttggagtctagcagagagtttttggtgcatatcagtgtccccttcactccctgacttttcaagtaacatttcccagaggcaaattaactctgctaagaggatctgcttgcagcttcaacagagccttcatcaggtatctttggccaaggagttgactgatcctgactttgcgagtcctagagatcttttcacaaagctcctctcatgtttctgcctctgattttcttaaatgtcacagacagactttagatttaggggttggttaactttttttgtaaagggccatgtagtaaatattttaggctttgtagatcatatggtctctgtgtcaactactcaactctgcctttgtaggatgaaagcagccatagacaatactggaactaatgggagtagctgtgttccaataaaactttatgggcactgaaatttgaatttcacttaattttcacatgtcgtttaatattatttttcttttttaccatttaaaaatttagaaatcattcttagctctttgggcctcacaaaaacagatggtagagtggatttggtttatgggctgcagtttgttgacctgtgctttagctaatcacttctgtacttataaatctgcataggttttatgtttttccatctcttggtatcttagtaggccagtcaaagtttgaacaacttgttagcacagaatacctggcctagtggcttcttggtcctgagcttatttactaaacaagagaaaaaataaataagtctagaaatgctagaagaggatacttttttgttttaatgatctagtagatcactcctccttgcaatacccagaggagaaactgaaaatatttcaaacattttctagacttctgtgttgtaaatttgtggataactatgaactatatatgaatgaacttttctggatgacacatatattccagatggtaaaaaggaagggctttggggactctctggtaccaagtgtcatggaaaaactgtgtgtctcatagaaagtagatcccaggaggccagcagagttgtggatctgccatatattacctcatgattctgtcttcgcacactcaccggcttaattctgggcctccccataacacgactagaccacaggcttgcagaagaaataatttagctctgtaactcattgaagttggtgcccacccaagtctctgtcagtgcccaattcgggagccatgccaagaatttgccattgctgcttcatggtggccttgtgcctgcttatttatagcctgtgcattttatgaaacagggattaataagaagttgccatagcacttgcaccattatgtaaatatctgtaatgcttacataacttttgtcacttgcaagaccttttgagtccattgccttctgctaccatgccttaccaatttcctagtcccttattattatttttcaattcattatatttaacttctgtgatacacgttcagaatatgcaggtttcttatataggtatacacgtgccgtggtggtgtgctgcaaccaacaacccgtcatctacattaggtatttctcctaatgctatccctccactagcccaccaccccctaataagccccagtgtgtgatgttcccctccctgtgtccatgtgttctcattgttcaactcccacttatgagtgagaacatgcagtgtttggttttctgttcctgtgtttgttttctgagaatgatggtttccagcttcatccgtgtccctgcaaaggacatgaactcatccttttttatgactgcatagtattccatggtgtatatgtgccacattttctttatccagtatatcattgatgggcatttcggttggttccaagtctgtgctattgtgaatagtgctgcaataaacatacgtatgcatgcgtctttatagaagaatgacttataatcctttgggtatatacccagtaatgggatggctgggtcaaatggcatttcaggttctagatccttgaggaatctccacactgtcttccacaatggttgaactgatttacacccccaccaacaatgtaaaagtgttcctatttctccatattctctccagcatctgttgtttcctgactttttaatgatcgccattctaactggcattgacatggtatctcactgtggttttgatttgcatttccctaatgaccagtgatgataagctttttttcatatgtttgttggccgcataaatgtcttcttttgagaagtgtctgttcatatccttcacccactttctggtgtggttggttatttttttcttgtaaatttgtttaagttccttgtagattctggatattagccctttgtcagatggatagattgcgaaaattttctctcattctgtaggttggttgttcactctgatgatagtttcttttgctgtgcagaagctctttagtttaattagatttcatttgtcaattttggcttttgttgccattgcttttggtgttttagccatgaagactttgcccattcacaattgctacaaagagaataaaatacctaggaatacaactcacaagggatgtgaaggacctcttcaaggagaactacaaaccactgctcaaggcaataagagaggacacaaacaaaaggagaaacattccatgctcatggataggaacaatcaatatcgtgaaaattgccatactgcccaaagtaaattatagattcaatgctatccccattaagctaccattgactttcttcacagaattagaaaatactactttaaatttcatatggaaccaaaaagagcccatatacccaagacaattctaagcaaaaagaataaagctggaggtatcaagctacctgacttcaaactatactacaaggctacagtaacccttatcaattttttatgtgcctctccatattctgcagtcagaagcttcttcagtcctttcagggaattgctgggtgactatcaaactctggtagttcatttttgcagttggctgctgttgtgaggataagagttagactcactttctcttcagagatagaaattatgtattaattctctgggttctagacccacagcaaggagcatactgctcctcaaaataactgaattctgcgagaagccatcattgtaaaacaacaatatcttcagttatagtagccatgtgtgcaacttctggaaactgttattcagattttcatgttccttccctgtctcttcatagctaggcagctgctttcagccttgtacagatgctagtgagctttctacctacaaacctgcagaaaattgaactgagatttggaggtgaaagactcttgataaagggaacaaggtttagaattctcagtccctttgctcccaggctgtgttgtgactactgaggcactccagtgaaatcactattcctcctatctagactaatgcctgtctctgcagagcacctcataagaacaggcctggtagtaatatcctcatgcattcagtcagtaaatatttacagagtgcttactacatatagggtattgggctgacatatgcaagatacagggcctgcttccaggaggttatagcttattgatcataaatgtggcattttttttttttgagacggagtcttgctctgtctgtcacccaggctggagtgcagtggcacgatctcggctcactgcaacctccacctcccaggttcatgtgattttcctgcctcaccctcctgagcagctgagactacaggggctcatcaccacacccagcttttttttttttttctgtatttttagtagagacagggtttcaccatattggccaggctggtctcgaactcctgacctcgtgatccacccacctcagcctcccaaagtgctgggattacaggcgtgaaaatgtggcaatctttaaagctcttcagtggatgaaaggccaccctatctgctgtccttttgaacttcgcaactttcttggtacagagtgagaggttattctcttggttttccatataagtaaactgaggctttgccagttcatcaacaggtagtaaataatatatttggaatttgaacccaagtcttctggggtcaaaggcagcattcactctgctctgtcacagcagctcctcaaataagccaacatagaaaccaagtactatgcctaggcaacaagaaaggcagcaatgaagagcaacagcagagtcaaatatgagagaaggaagttaagaaagatgttaagtactgtggggagtaactgagaaaccaccaagtatcgctaacatcacagggaacttgtcttcctaagaaaattccaagcacttaaaaccgctggtagttcatcagcaactctcttcattagatgtgcgagggacatgtgggccatagtccttctactaacttatattcttcaggggaaagttctgattctgatgagacccagcatggtagctcttaattcactgttgtcacacgactatagaacaggaagcacaacttaacacctgtgctcatgagaattttgctccttatgaccaagctaaagaaagagcttagacaggatgtgtggctataaatgtagattaatggttccttggctctttggtttgagccttctcagcagagcatcccacggagtgttttccatggggccacgagcaagagaaatccacttccctcctcctcaatgtcagaaaatagagaatattgtctttcaggatagaattaaaaagtcatagaggcagcaacttgttttcctatattagggttttaaaattctgtttttccttcctctcctgggtcagatcattgtgtggatggaccttgatttcattgtggtatctgtatgtggaccctgaagaccatggacttctaacaattccttaagttacataagcacattcctacaggtcacaagctcatttacttacaggatggttgatttggtcacaggttatttcatgaaaatacttaaaagatttgcagtgttcaaaactgcagtatctttaaacactaaaacttgaaggaagggaatttagaaatcaaaaaatctggtcaaaccatttcatggaaaaggaaagtgaggctcagagagaggaaattactttcctgggtttgtatagcctataaatggcagaaatgagagcctccctgccatttctagttttctgtctgagagactctcctgcctaatagctaattagcagagtcacagaggtcattaccttgcaattctcaagaattatgtgaggcagcatagtaagcatttatggcccttggttcctagaaggagcttagtccctgatagtcatctctgcctttgccattgtgtgagactgtcttctgtaactgtatgtcttcctccctagtaagttaatgagtaataaaggtattctatagtgagaggactctgtaagacatttcttggtgtgaggattgttccaaggttgttttgtgtgtatgtgcatgtataaacttttttagggagcatattcatagcttttacatggatctcagaggctctataacccagagaagattacagaataccagtcttgtctttggtaaggattttatagacccatcctgactacagtgatatccaacatggctatgtaatgactggcactttccccacataacatatatttattccacactcagtgcctactgtgtacatgagacctataccgggcactgggataagagacatgaaataacagctaaaattgtttattgagcagtcagtatgcattagatgctttgtagtcattttcttattcaatctgtataccctcaatttacaaatgaggaaactgaggcacagaagagttgagtgatttgcccaaagtcatacaaatagtcagtggctatgtgatgaatagttaccaacataaaagagtgagattactgctgtactaaaagtaggtacataatcccctgagcagacagtatgagagaatgatttattttacctggaaagtttaggaaggcttcacagaggagttaagggttgatctgggtcttgagggatggataagagtttgccagatacaaaaaggtaggaagagaacttcaggaggagggaacaggctgagcaaagacacggcgatgtgaaagtgggaggcttgtttggggaacattatggaatctggaggttattgtggggaatctcatcagatgcagcaagctgtttgacaggccttcagttggctctttgtaccttgctccctccgcatgctgagctgtccatagctgccctaggctggtgtctgggattttcggaagaaggttactatccaggtagtgtaacaagatgcagtgcaaaagcaccagattggggctctggctctgctgctgacttaccacctggccttaagcatgtctagttccctctttgtacattaaaatctccattggaacagtaacatggttgtattaaatgatcttgaagattttacctgcacgttttgcacatgtaccctaaaacttaaagtataataaaaaaattaaaataaaaaataaaaatataacaatataaatctttaacaataattttagtagtaaatctctacaattttacagataatccagatgcatccattggccaatggttcactttgtatgcataatatttgggaaacaggcagacccaatttcaatccttagttgtaagacttaatacatatgtgatctcgagcaaatcacttttgtatgcctctataaggataataatagctcacagaattattttaagaactaaatgatgtgtaataaagctactggtactcagtaagttttgtatccttttcctagagtgagtcttggtcataggcatgcgtatacttgcagcgtccctgggtaggccgaaagagcaaataagagatggtatctatggtattccccaggtaaaggaggccttgggttggcataagatttcacttctctttagagttacttaattagggaccagaaaggccatcagcatttgtatgagaatataacaaaggtcaatctcttcctctttactttttacctcccagtacactgtgagtaacattccccagccagcccagccagcacgtgttcattgcctctcttgacttccagactttggacttgaaggtgtcagagctctctgtgtatctttgtccccaacaagataagtctgacctccccagcaaattcaagtcctaagccactgtccaggagaaaagctagcaaggtcataaattattctccatattttccagccattggtttcccttgtccagccagaggtgtgtctcaaagtatgctgaggccagattcaatagaaacctgagccagcacctgtgtaaataatttttaaagctccttttcctgaagctggatgaatatttttaaaaactaagctggattgtcttttatctagcatgccgtctcctacattcctagtgctatggacctcttggaggaatgtggtttggttatagtggtattgtcttgtctgttgtgggggagggagacatttctttcagaagcaaggtaatactttggtctggtctatgactctattttgtttaaaatgaaactatggcagtatagtggtattcattctgcttcccataggttaactttacatccctctgtcttcacccactcttcagttctgattcttttaaaagcagccaaccaaaaccagcaagtacatactgcttatctctgacttccaccagaatcaacttcagatcttgtccaaagctccatctgaagagaggggaataacacccagccaagagccctcagggcccatcagtaagtagacatcctgtccttgaggttccttaactctgctcagcttcagaatacagaaggggttggttcttcatttgtgttgtttataactaaaagcctcctactccccacttttttgcatagcttcttctgccatcccacctgtgtagcctcttcaactcccccaaaactcctctgtagcccatgtcacttggaaagagttttctttgtctcttttgcaacttgacaatgactagccagcaagtttaagttcaaattattgttccatgggagcagagatagatataggaaacaaaaaaaagggatatggaggtatagagtgatttcccacctacctagtgagcactactgagatattcaagtactctctacccaagaattctattgatataaaggtaaaaaacttgatcttaggtctaatatccgttagtagtgtgaccttgggaaaatgataccacccccaaaggcttagttttcttaactgtaaaataggcatacagatgaccacccccagaggattcataaggataacatgagataaggcaacttgaaatttcctagcatagtgatagactttcgaaaataaaatgaatcaaacactgataacagtacttcctagtacacaaatgagaaatcagtccctcatcaaattacagcacattttcaatgctccaattatgtcactgtagaaatgctaatgtggattaaataatttgtctgttgctatttatacggataatttgatagtagttatttttggacatggatagctttgaagccttacagatgagtccatccccaagtacccaaaactaaagaaagttggctagagtgatgacaaggtggcagcacagagctccctgcgttctgggccctgtcccctagctagagagaactccaggctataagcatttgtattctcatagtccaatggcagggaagaagggctggaggtgagtagttttcactcatttattttttcaacaagcatgtatggtatcaggccttgtatgcatccagagacaaatgtgaactagccgtgtcctcaaggagattccagtctggtgggcctgccttccaaggtcagttgcagctttagcactataaagagcacctacctgcggcagatacaatgtgatgggacatgacagagaaaaaatctataagcagagcctccccattcccaggcattgaaacaatcctaaccaagactggcatagtacaatgagcctgtccctatcagcaggtttggaagccttaacaacaacaacaaaaacaataataatggtgatgataatcatagagcctaatgttaccaaacattttccatgtgttaagtactatactaagtgcatacttaatcctcacaacaatgctataagatagtagatactcttactactaccctgattttacaaatgtggaaactgaggcacagaagactaagagaacaggaatacacctaattcacctcagttcaacaaacatcaagcatctgttttatgtcaggcctcgtgctggatggcagggagagagagatgagtaaagcatagtttcagtccagtgggagcaaatgacagcacacagtggggcaggtatattgcagcccttctgcttgatgctaagaactcagtgtcagtgatgaatgaaacacagtcattctctcaaagatcttaaagcttagtaggagatatctgtgtggaaacaaaaattaaatactgctgtgataagtgtcataagagataagtggaaaatgagagagagagatcactgtagcaattgattggtttaaatcaaagcccccaaaaaaatgttattgagaattataaaacaactaattgatttaaatcaaagcccaaacagaagtgtttgctaattttatttcaatttggttgataatttggttgaaatgaatttatttcattttttattccatccttacaatggaagattagtgcttgtttcccacccaaggataccaggatatttcaggggctgtattacaatatagttaaattattcctttatctcaaagcacatccacactttcccctatccttacctttactcagggtatctcttctgcctcaggtgctttttctccacatttccatattcttaagtcctaccttccttcagggcctcactcaaatgcctcctcctccatgaagcattcacccgactgaaaggtaccccgccctctcctgtactccacatcacttcatgggtgtctccacttcctgctttatctttcagtaatacacttacagttctctttcctccactagactgagctcttcagaggaagactcacttggctgaaaccatgattttactttaaacacattgaaaacctctactggagtgcattgtgtctggtgggcttcaaccttaattcttaagtatgtgaaaacacatcacctatctggaggtttacactttctgctaatgactttatttttaagcccaccaccctaacacaacaaatacttaaaacttgtcttcatttcctttaggtctggccctcatgcatgcatataatttatagagtcactgttttgctcggttgtcctcatgcctctatattattggaggtttagattgtttccatatactcaggttgtattcatgtcctttttttctttttaaatttccttagcatccatttccaccattggaaattcagggtcaaaacaggggtttgggattggagcatgtctatcacagataaccaatcatgtgttatgacttaagaatttatgaaagggccctctacctgaagatatcttgctactgatgctgtctcacagtgtctgaaactcccatcatatgtggaattgttttggaaggctttgcctcctgggacacattcagccataatcaagaaatagtattgagcattagactgtcagtatgtccattagcaagactgtggaggaatggaatcaccaatattatattttataggggatacagaatacaagagaagttctgaagagaaaattcttatgtagaataggaaggcttagatacagcatgaaagctgcaggctttgaggagccagaggtcaaatgaaagcattgagtatttgtttagatgaaagaacagaaagggaaaaagaagcagaggaagggatagtagagagaaatgtataagttttatccatttaacttgtaattgtgtttggctatgggcacaatagaagcagtgagatcactttattttattttattctttatagacagggtcttgctatgttgcccaggctgcagtgtgcagctcttcacaagtgtgatcatagcgtactacaccctcaaactcctggactcaagcaatcctcccatctcagcctcctgagtagctgggactacaagtgcacaccaccacgcccagtgagatcacttgaaactagggagagatgtgtgagttctgggcaaccagtagttggctttacatagaactgtaggggtcaaggccaaaggggacgtcctgttccaagtcaccttctttggacattagaaaaccacgaggggtttggaaatcagaaaaccagcagaggcaggaaaactcagggcagcatgggagattcagtatatacaaaaaggttcacaccagtaatcaaacagaattttaactgctgatgtggagtagaggcagctttgtctgctgtgtgataaccaaacctttacgaatagtaggtgtatatggggaattggagggagataggtggctgtgtttagtaattggttgacttcactgagatggtttggggattgtggcttccagatgatcagattttcttttttaggtagagactccaacatcattacagaactataaattacatgtggaaaagaaaggcctcctatgttagaatagaaaataaaatgctgtggggttgagggacagaggtgctgtctaggaagtcagatagcgttttccagttctgtccctcagagttccttgtcctcattgagactcaatttctcttacttttttttttatactttaagttttagggtacatgtgcacaacatgcaggtttgttacatatgtatacatgtgccatgttggtgtgctgcacccattaactcatcatttaacattaggtatatctcctaatgctatccttcccctctcccctctccccaccacaggccctagtgtgtgatgttccccttcctgtgtccatgtgttctcattgttcaattctcacctgtgagtgagaacatgcggtgtttggttttttgtccttgtgatagtttgctgagaatgatggtttccagcttcatccatgtccctacaaaggacatgaactcttcattttttatggctgcgtagtattccatggtatatatgtgccacattttcttaatccagtttatcattgatggacatttgggttggttccaaggctttgctattgtgaatagtgccatgataaacatacgtgtgcatgtgtctttatagcagcatgatttataatccttagggtatatacccagtaatgggatggctgggtcaaatggtatttctagttctagatccctgaggaatcgccacactgacttccacaatggttcaactagtttacagtcccaccaacagtgtaaaagggttcctatttctccacgtcctctccagcacctgttgtttcctgactttttaatgatcaccattctaattggtgtgagatggtatctcgtggttttgatttgcatttctctgatggccagtgatgatgagcattttttcatgtgtctgttggctgtgtaaatgtcttctttgagacgtgtctgttcatatcctttgcccactttttgatagggttgtttgtttttttcttgtaaatttgtttgagttctttgtagattctggatattaccctttgtcagatgagtagattgcaaaagttttctcccattctgtaggttgcctgttcactctgatggtagtttcttttgctatgcagaagttctttagttgaattagatcccatttgtcaattttggcttttgttgccattgcttttggtgttttagacatgaagtccttgcccatgcctatgtcctgaatggtattgcgtaggttttcttctagggtttttatggttttaggtctaacatgtaagtctttaatccatcttgaattaattttagtataaggtgtaaggaagggatccagtttcagctgtctacatatggctagccagttttcccaacaccatttattaaatagggaatcctttccccatttcttgtttttgtcaggtttgtcaaagatcagatggttgtatatatgcggcattatttctcagggctctgttctgttccattggtctatatctctgttttggtaccagtaccatgctgttttggctactgtagccttgtagtatagtttgaagtcagatagcgtgatgcctccagctctgttcttttggcttagggttgacttggcgattcaggctcttttttggttccatatgaactttaaagtagttttttccatttctgtgaagaaagtcatgggtagcttgatgaggatggcattgaatctataaattaccttgggcagtatggccattttcacaatattgattcttcctacccatgagcatggaatgttcttccatttgtttgtatcttcttttatttcattgagcagtggtttgtagttctccttgaagaggtccttcaagtcccttgtaagttggattcctaggtattttattctcttagaagcaattgcaaatgggagttcactcatgatttggctctctgttttctgttattggtgcataagaatgcttgtgatttttgcacattgattttgtatcctgagactttgctgaagttgcttatcagcttaaggagattttgggttgagacgatggggttttctaggtatacaatcatgtcatctgcaaacagagacaatttgacttcctcttttcctaattgaatgccctttatttccttctcctgcctgattgccctggccagaacttccaacagtatgttgaataggagtggtgagagagggcatccctgtcttgtgccagttttcaaagggaatgcttccagtttttgcccattcagtatgatattggctgtgggtttgtcatagatagctcttattattttgagatacgtcccatcaataactaatttattgagagtttttagcatgaagcgctgttgaattttgttaaaggccttttctgcatctattgagataatcatgtggtttttgtcgttggttctgtttatatgctggattatgtttattgatttgcgtatattgaaccagccttgcatcccagggatgaagcccacttgatcatagtggatacgctttttgctggtattttattgaggatttttgcatcaatgtttatcagggatatcggtctaaaattctcttttttgttgtgtctctgcctggctttggtatcaggatgatgttggcctcctaaaatgagttagggaggattccctctttttctatttattggaatagtttcagaaggaagggtaccagctcctccttgtacctctggtaggattcagctgtgaatccatctggttctggactttttttgattggtaagctattagttatatcctcaatttcagagcctgttattggtctattcagagattcaacttcttcctggtttagtcttgggatggtgtatgtgtcgaggaatttatccatttcttctagattttctagtttatttgcatacaggtgtttatagtatgctctgatggtagtttgtacttctgtgggatcggtgattatatcccctttatcattttttattgcgtctatttgattcttctcccttttcttctttattagtcttgctagtggtctatcaattttgttgatcttttcaaaaaaccagttcctggattcattgattttttgaagggttttttacatctctatttccttcagttctgctctgatcttagttatttcttgccttctgctagcttttgaatgtgtttgcccttgcttctctagttcttttaattgtgatgttagggtttcaattttggatctttcctgctttctcttgtgggcatttagtgctataaatttccctctccacactgctttgaatgtgtcccagagattctggtatgttgtgtctttgttctcattggtttcaaagaacatctttatttctgccttcatttcattatgtacctagtagtcattaaggagtaggttgttcagtttccatgtagttgagcggttttgagtgagtttcttaatcctgagttctagtttgattgcactgtagtctgagagacagtttgttataatttctgttcttttacatttgctgaggagtgctttacttccaactatgtggtcaattttggaataggtgtggtgtggtgctgaaaagaatgtatattctgttgatttggggtggagagttctgtagatgtctgttaggtctgcttgacagtggagtgttaaagtctcccattattattgtgtgggagtctaagtctctttgtaggtctctaaggacttgctttatgaatctgggtgctcctgtattggttgcatatatatttaggatagttagctcttcttgttgaattgatccctttaccattatgtaatggccttctttgtctcttttgatctttgttggtttaaagtctgttttatctgagactaggattgcaatccctgcctttttgtgttttccgtttgcttgataaatcttcttccatccctttattttgagcctatgtgtgtctctgcatgttagacgggtttcctgaatacagcacactgatgggtcttgtctctttatccaatttgccagtctgtgtcttttaattggagcatttagcccatttacatttaaggttaatattgttatgtgtgaatttgatcctgtcattatgatgttagctggttattttgctcgttagttgatgcagtttcttcctagcctcgacggtctttacaatttggtatgtttttgcagtggctggtaccggttgttcctttccatgtttagtgcttccttcaggagctcctgcagtgcaggcctggtggtgacaaaatttctcagcatttgcttgtctgtaaaggattttatttctccttcacctatgaaggttagtttggctggatatgaaattctggttttaaaattcttttctttaagaatgttgaatattggcccccactctcttctggcttgtagagtttctgctgagagatcagctcttaatctgatgggcttccctttgtggggaacctgacctgtttctctggctgcctttaacattttttccttcatttcaactttggtgaatctgacaattatgtgtcttggagttgctcttctcaaggagtatctttgtggtgttctctgtatttcctgaatttgaatattggcctgccttgctagattggggaagttgtcctggataatatcctacagagtgttttccaacttggttccattctccccatcactttcaggtacaccaatcagacatagatttggtcttttcacatagtcccatatttcttggaggctttgttcatttctttttattctttttcctctgaacttctcgcttcatttcattcatttgatcttcaatcactgataccctttcttccagttgatctaatcggctactgaggcttgtgcatttgtcacgtagttctcgtgctgtgtttttcagctccatcaggtcctttaaggacttctctgcattggttattctagttagccatttgtctaattttttttcaaggtttttaacttctttgccatgcgttcgaacttcctcctttagctcagagtagtttgattgtctgaagccttcttctctcaactcgtcaaagtcattctccatccagctttgttccattgctggtgaggagctgcattcctttggaggaagaaaggcactctgatttttagagtttccggtttttctgctctgttttttccccatctttgtggttttatctccctttggtctttgaagatggtgatgtacagatgagcgtttggtgtggatgtcctttctgtttgttagttttccttctgtcaggaccctcagctgcaggtctgttggagtttgctgcaggtccactccagaccctgtttgcctggttatcagcagcagaggctgcagaacagtggatattggtgaacagaaaatgttgctggttgatcattcctctggaagttttgtctcagaggaatacccggatgtgtgaggtgtcagtctgcccctacttgggggtgcctcccagttaggctactcggggttcagggaaccacttgaggaggcagtctgtccgttctcagatctccagctgcatactgggagaaccactactctcttcaaagctgtcagacagggacatttaagtctgcagaggtttctgctgccttttgttcggctatgccctgcccccagaggtggagtctacagaggcaggcaggcctccttgagctgtggtgggctccacccagttcgagcttcccagctgctttgtttacctactcaagcttcagcaatggcgggcacccctcccccagcctcgctgctgccttgcagtttggtctcagactgctatactagcaatgagcgaggctctgtgggcgtaggaccctctgagccaggcacaggatataatctcctggtgtgccgtttgtgaagaccattgaaaaagtgcagtattatggtgggagtgacccgattttccaggtgccatctgtcacccctttctttgactaggaaagggaattctctgatcccttgtgcttcctgggtgaggcgatgtctcgccctgctttggctcatgctcggtgcgctgcacccactgtcctgcacccaccatttgacactcccctgtgagatgaacccggtacctcagttggaaatgcagaaatcacccatcttctgtgttgctcacgctgggagctgtagactggagctgttcctattcggccatcttcacaaaaatcttactttggtttctagtgttaccacccactgttctttctcatctcaaccctgagtataagtacagatcacattccttgggttcttagaaaataatagaaatgaactctcattcatcaaaatgcccattagtaaatactgagggagaacaaactagaaatccagtatagaaaataaaaataggattatattccttggaatctcagaaaaaaacaatgaagagctttctttgggcattagacactttcccataaggtggctgactctcttttagtcatgtcagcttggcccaatcttcacttggtagcccttctttcttcttcattaatccatctcctatgctcctatggggtcctagagaaatgcccatcatgtacacacacatctaataacacaaagatcactctcgactagcaagcccttttatgatggtgtgagcatttgacacccttgttgctagtaacatcagtgagtgacctgacccatttttggaacagaatatgatcagtatgttgcctcaaggaggccctcactgttctaggaaatataattccagagtttgctgactcacaccatggaatatatgcataaaatggatcctgcagataagcctttctctgactagtttcagacatttttttctgggtaattttaaagttattttttatttttgtgggtacaaagtaggtgtatatatgtatgaggtacctgaggcattttgatacaagcatacagtgtataataatcaccagagttaatggggtatccctcaccacaagcatttatcctttctttgtgatacaaacaatccaattatattcttttagttattttaagatgtataataaattattgttgactgcagtcaccctgttgagctatcaaatactagatcttattcattctaactatacttttgtacccagtagccatcccacttcctcccctcccactacccttcccagcctctgataaccatcattccactctctatctctatgagctcaattgttttaagttttagctcccacaaatatgtgagaaaatgccaagtttgtctttctgtgcctggcttatttcacataatataatgtcctctagttccatccatgttattgcaaatgacaggatctctttcttttttatggcttaatagtactttattgtatgtatgtaccacattttcttcatccatttgtctgttgatagacaagagttgcttccaaatattgactattgtgaatagtgctgcaataaacgtgggaatgcagatctctttgatatactgattttctttctttagggtgtatacccagcagtgggattgctgggtcatatgatagctctatttttagtattttgtggaacctcaaatctattctacataatggttttactgacttacatatccaccaacagtgtatgaggatactcttttctccacatcctcaccagcattcattactgcctgttctttggatgaaagccattttaactgtggtgaaatgagatctcattgttgttttgatgtgcacttctctgatgatcagtgaggttgaggaccttgtcatatatctgtttgtcatttgtatgttttattttgagagatgtctacccagatcttttgcccattttttaatcagattgttagattttttttttcctacagagtgcttgagctctttatatgccctagttactagtccctggtcagatgggtagtttgcaaatagttgctctcattctgtgggttgtctcttcactttgttgatcgaatcacttgctgtgcagaaggtttttaacttgatgtgacctcatttgtccatttttagttgcctgtgctggtgcggtattactcaagaaatttttgcccagattaatgttctggagagtttccccaatgttttcttgaagtagtttcatggattgatgtcttagatttaagtctttaatatgttttgattttatttttgtatttgctgagagatagggctctagtttccttctgcatatggatatccagtttttctagcaccttttgttaaagagactattcattctctaatatacgttcttggcacctttgttgaaaataagttcactgtagatgtatggacttgtttctgggttctctgttctgttccattggtctatgtgtctgcttttatgtgaataccatgttgttttggttgcaaaagctctgtagtataatttgaaatcaggtaatgtgattcttccagttttgctctgttctttttcctcaagatagctttgcctatcctgggtctcttgtggttctatataaattttaggattattttttctatttatgtcaagaatgtcattgatattttgatataaattgcgttgaatctgtagatagcttcaggtagtgtggacattttaacaatatcaattcttgaaatccacgaacatggaatatccttctattatttggatgtcttcttcaatttcttatattaatttttttttagttttcattgtagagatatttcatttatttgactaagtttattgctaggtattttattttatttttacctattgacaatgggattgctttcttgatttcttttttagattgttcactgttggcatacagaaatgctactgatttttatgtgatgattttgtatcccgcaactttactgaatttgtttatcagttctaataggcttttggtgcagactttaggcttttccaaatataagatcatattatctgcaaacaagaataatttgacttctttcttttcaatttggatgcctttcatttctttctcttgtctgattgctctaactaggacttccagtactctgttgaataacagtggggaaagttaacatccttgttttgtttcagatcttatagccaaggccttcagtttttctgaatttagtatgatactagctatgggtctgtcatatatggcttttattatgttgaagtatgttccctagttttttgaaggtttttatattttaaggaagataaaaattgaactttatcaaatgcttttcatgcaacaattgaaatgatcaagtgctttttgtctttcattctgttgatacgatgtatcacactgattgacttgtgtatttagaaccatccttgcatcccgtggtaaatcccacttagtcatggtgaatgaactttttaatgtgttgttgaattcagtttgctagtattttgttggggatttttgcatcagtgtttatcagggatattggcctatagttttccttttttttatgtgtcttttgggttttgttatcagggtaatactggccttgtagaatgagtttggaatgattctctcctctattttttgaaatactttgaataggattgatgttacttctttaaatgtttggtaaaattctgcactgaagccattgggtcctgggctttttactgctggggagacttttcattacagcttcaatcttattacttgttattggtctgttcaggctttagatttttttcatgaatcaatcttcacaagttgtctgtttctcaaaatttatcaatttcttctaggttttccaatgtattgtcatccagttgctcataatgccctctaatgatgccttgaatttttgcagtaaccactgtaatgtttccttttttaatctctgattttatttgagctttctctttttttcttagtctagctaaatatttgtcaatgttgtttgttcatccacaaaaccaacttttcatttcactgatcttttgtattattttttccttttaattttatttatttctattctgatatttatcatttcatttcttccagttatttgagtttggtttgctcttgcttttccagttctttaagatgcattgttaggttatttatttgaacttttttgatataggtgcatattgctataaactttcaccataatattgcttttgctgtatcccataggttttagtatgttgtttagtatgtttccaatttggtacatttcaataaatttttaaattttcttctttatttattgacatagtcattccagagtatactgtttaatttccatgtggtttgtatagtttccaaaattcctcttgttattgatttctagttttattccattgtggtcagagaagaagcttgatatgaatgcaattgttaataatttttttaaaacttgttttgtgacctaagatatgatctgtcattgagaatgatccatatgctgaggaaagaatgtatattctgcagccattggataaaattgtctttaaatatctattaggtccatttaagacataatgcagattaaagccgatgtttcattgttcatttttctgtctggatgatctcttcagtgctgaaagtggtgtgttaaaatctctaaatattattgttttgggatctttctcttctttcaactctgataatatttgctttagatacctgggtgctccagtgttgggtgcatatatacttaaaattgttgtatcctcctgatgaattgacccctttatcattatataatgaccttctttttctctttgtgtagtgtttgtcttgaaatctattttgtcggatattagtattgctgctaatttttttggtttccatttgcatgaaatatctttttcattcctttattttcaggcagcgtgtttctttatatttaataggtgaaatatgtttcttgtaaataaaaattattattttaaaatatttttaaaataatactattttttaataagaacaattattattttttaaaaaatttcattagttttgggggcacaagtggattttggttaaatgggtgagttctttagtagtggattttgagattttagtgcagcagccacctgagaagtgtacattacccatatattatatatatactatatatgctttatatatatagtgtgtatatataatatatatacaactacatattgggtaatgtacacttctcaggtgactgctgcactaaaatctcaaaatccactactaaagaactcacccatttaaccaaaatccacttgtgcccccaaaactaatgaaattttttaaaaaataataattgttcttattaaaaaatagtattattttaaaaatattttaaaataataatttttatttacaagaaacataattcacctattaaatataaagaaacacgctgcctgaaagtaaaggaatgaaaaagatatttcatgcaaatggaaaccaaaaaaattagcagctatactaatatattatatatatactacataaagcatatatatagtatagtatatatataatacatttataaagcatatatatagtatgtagataatatatgtttatatactttaagttctgggatacatgtgcagaacgtgcaggtttcttacataggtatactcgtgccatggtggtttgctgcacccatcaacctgccatatacattaagtatttctcctaatgctatctttcccctagccctaccccactccctgacaggccctggtgtatgatgttcccctccctgtgtccatgtgttctcattgttcaactgccacttatgagtgagaacatgtggtgtttggttttctgttcttgtgttttagtttgctgaggatgatggtttccagcttcatccatgtccctgcaaaggacatgaactcatcctttttgatggctgcatagtattccatggtgtatatgtgccacgttttctttatccagtatatcattgatgggcattttggttggttccaagtctttgctattgtgaatagtgctgcaataaacatacgtgtgcatttgtctttatagaagaatgatttataatcttttgggtatatacccagtaatgggattgctgagtcaaatgatatttctggttctagatccttaatgaattgccacactgtcttccacaatggttgaactaatttatgctcccaccaacagtgtaaaagcgttcctatttcttcaaatcctcaccagcatctgttgtttcctgactttttaatcgccattctaactggcatgagatggtatctcattgtggttttgatttgcatttctctaatgaccagtgatgatgagctttttttcatgtttgttggcagcataaatgtcttcttttgagaagtgtctgttcatattcttcacccactttttgatggagttatttgttttcttcttgtaaatttgtttaagttccttgtcgattctggatattagctctttgtcagatgaatagattgcaaaaattttctcccattctgtaagttgcctgttccctctgctgatagtttcttctgctgtgcagaagctctttagtttaattagatcccatttgtcaattttggcttttgttgccattgcttctggtgttttagtcatgaagtctctacccatgcctatgtcctggatggtattgccttggttttcttctacagtttttatggttttaggtcttgcatttaagtctttaatccatcttgagttaattttgtataacgtgtaaggaagaggtccactttcagttttctgcatgaggctaacgagttttcccaacaccatttattaaatagggaatcctttccccattgtttgtttttgtcaagtttgtcaaagatcaggtggttgtagatgtgtggtgttatttctgaggcctctgctctgttccacgtgtctatatctctgttttggtaccagtaccatgctgttttgggtactgtaccacttgattggtgagagagggaatccttgtcttgcactggttttcaaagggaatgcttcagcttttgcctattcagtatgaccaatatgtagtcttttattcctcaccctctctcaacaccccacccccacggagtcctcaaagtccattatatcactctgtatgtttttgcgttctcatagcttagctcccacttataaatgagaaaatacagtatttggttttccattctttggttacttaattagtataatggcctccagctccatccaggtgtcttgtttttcatccattcagccagtctataacttttgcttggagagtttcgtccatttagattcagcgttatgattgataactaagggcttactcctgccatttggttgttttctggttattctgtggtcttctcttccttttttccttctttcctgtctcccttttagtgaaagtggttttctctggtggtgtattttattttcttcctttttatttttttttgtgtgtatttgttgcatgttattgatttgaggttaccatgaggcttgtacataatattttctaactcattatttcaaactgatgacaacactctatcgcataaaaaaacatggaaagagaaaactaataaaaactctacattttaacttcatctctctgcttgttgtcactttgtcgtttctatttacatcttattgtactgtttatgtcttgaaaagtagtttcagttattacttttgattggttcatctcatagtctttctactcaagatatgagtagttcacacaccacaattacagtgttacaatattctgtgtttttctgtgtactttcaattacccatgagttttgtattttcagataatttgttattgctcactaacatcctattctttcagattaaagagctccctttagcatttcttgtaggaaaagtctggtgttaatgaattccttcagctcttgttgatctgtgaaagtctttatttttccttcatgtttcaaggatattttcactggatagtctattctagggtaaaagttttttttttttttttcttcagcccttcaggtaagtcatgccactctctcctggcctataaggctaccactgaaaagtctgctgccagacatatatgagttccattctatgttacttgtttattttctcttgttacttttaggatcctttctttatctttgacctttgggagtttgattattaaatgccttgaggtggtcttttttggattaaatcttcttcgtgttcttgtacttggatattaatatctttctctaggtttgggaagttctctgttattatccctttgaataaactttctaccaagatctctctttctctctctgtctctctctctctctctctctccttcttaaggccaataacttttagatttgcccttttgaggctgttttctagatctcgtaggtgtgcttcattgtttgctattttttttttttttttgtctcttctgactacattttcaaatagcctgttttaaaactcactaattctttcttttgcctggtcaattatgctgttaagagactctgaggcattcttcagtgtgtcagttgcatttttcagcaccagaatgtctgcttatttttttttagattatttccatctctttgttaaatatatctgatagaattctgaattctttcttagtgttatctttaatttccttgaatttcctcaacacaactattttgaattatctgtctgaaaggtcacatatctctatttttccaggattgctatctggtgctttatttagttcattttgtgaggtcatgttttcctggatggtgttaatgctagtagatgtttttcagtgtctgagcattgaaaagttagatgtttattgtagtcttcacagtctgggcttgttcatacctgccctccttgggagactttccaagtattcgaagggatttggatgctgtgatcttagtctttggtcactgcagccatatctgctttatggagcatcccatgctcagtaatgctgtggctctttcagactcatagagttactgcctgcatgctcttgggtaagagccaggaaaattccctggattaccaagcagagactcttgttctcttctctcactttcccccaaacaaatagagtctctctctctctctctctttctctctctctctctccctctcattctctgccgacctgcctgaatctggggtagggatgacacaatcacatttgtagtcaacaccattgggactgtgctaggtcagacccaaagctggcacagcactgagtctcgcccaacgcccacagagaccactccctgggtaatgtctgtgtttgctcaaagcctaagggctatacaatcagtcagtggtgaagccagcctgtcttatgtccttcccttcagggtgatgagttcctcaagcaggtccagggatggtgtccaggagccaaggcctcgagctgtgactgagctggcacccaatccataagacaaagattttttccacactttccttccttgtcctcaagcaaaggagtctctccctgtggccaccaccacccccatgttcatggcaagtattgtctggctaccaccaatcttcactcaaggcccaggggttctttagttagcttatggtgaatgctaccaaggctgagtctctcccttcaaggaagtgggctcctctctggcccagggcaggtccggaaatactatccaagagccaaggcctggaatcagtttccccaagagtccatttggtgctctacacccactgtggcagaaccagtacccaagctgcaagacaaagtcctctttactcttccttctcctttacagagactctccctatagccaccacagctgggaatatgctgggtcactcttgaagcaagaacagctctgagtctcactcaaaactcctggcaagtactgcctggctatcacactgattattcagggcccaagggctctttagtcagcaggagatgaatcctgccagtactgattccttcccttcaaggcagccggtttctttctggcccagtgtgtatctagaaatatcatttgggagctagggcctggcatggtgacctcaggactctgcctggtgccctgttctactgtggctgatgtagtatccaaattgcaagaccaagtcctctttactctcccctctcctgtcttcaagcagaaggaatgagtccgccctggagttgggagctgcattgcctgggattggaggaggggtggcacaagcactctcttggtcaccccagctggtgtcttactaggtcgcatgttccccaagtccactggctctgaggctagcacaccaggatttgaccaagaattgcaattcttgtggcttacactgcctttcaagtttatttgagatcccagagcactttagcccacagtgacagggcttgccagaatttagtttctgactgctgagatggacaatttgcgtctgattagggctggtctaagtgctccttctgtgggcactggctgagttctgctccatgttgctttctgctgtgacagggcaacattgagtttcaatgcaagtcccacagtcactgcaatcttcctctcccaagcctgctctgaacaccatgtggttgctgctgggggctgggggagggatgttgtaggcaattcaagaatgtctttcctacccttttcggtgcttctttccttggtatgatattaaaaccagttactgtgattgctcacctgatttttggttcttatgaaggtgcttttttgtgtggatcactgttcaatttgtgcctgcaagcggggatgggggacaattgctggaggcttctctttggccatcttgctccacctctaccctagtattagcaatttcaaagcagttgggatggaggtagaaggaaagggcgcttggaatcagaaaatccatgtcttagctttgagccttagaaaattcatttgacccttgtaagcctcagttgcttcatctgtaaaagagaaataatataatggctgaaaagatcaaaggtgataatgcttttgaaaacactatagaaaatgacaaaatatcacatgagtattattttctagtttctaggagtctccttaccattgtacaggacaaccatgtctatttttaaataaattattatttgcctctgagcaaccctgcaaagagttgcctgtaggagaaacagctttacttgcaaatcactccactgttttctttgtgcacagcttattaatacataaggcacatgtcctccagcctgcagtaacattggaatcattacctctttggagtacctaccagagcttctcaaagtgaattttgtttatcaccacaaaaaatagtctgttgcagagataacctccaaattcaatgacaatatttccaatcacttttgcatgatgcagaaatagacaaatatataattttgcttatagagacaattattgtctcccaacaagtgatcagtagtcagaaaatggccaagaaataccatggggtgtgccttcccataacagcttatctttgtgttttagttgcaaggttactaaaagcctgtgcagggtttatggcaaaagtaaaacttgctccaggagcaagcccttgtttcattgtctaatgttcttaatccccagcagacaggatttggatctggcatttggtaacagggcagtttccaaagttgctgtacgcaacttgaggaagagaggtgatattatcggaatgaatttctttgttgtaagttataaatgtatgggcttttccaatcccatcacccttaaaactttatttgttttctgcagtgagggtgtctccgttgtctttaatatgcttgctttgagttcatggatgaacattcctgcctggctgacatgtggactctctgaaattgttataaggtctttttctttgtttttttcttgatgcccaagctgccaagggtagtactggcagtggtgggcagacaaggaggtgatagcaaactttgtcctctggcctcccttgacccattccattcattatctaagggactccaagccagcattccacagagtgccctcaccaaactcactaagactgaaggcgaaccaggattccaaacagccattatgaaaggaaagagagagagacttagggtttgcaaaataagataccctgttgattctttttattccatacagatactactattctttaggaaaacgttaaaatcacatgatcttccaggacctgggctgcttctttaagaagcatgttacagaaagctttattggccaacaacatattgaaagatagattaatcaatcattcattcaaataaggtatattcagaattgaggtatattgtagccagacagtgagactacaaaaaaagaatgcaccgtacccttatctcttgcacaatctaacgagggagataaccactctttcaatttatagtgacctataacatttcgtacactgctgaatatctttacatggtaataacacaatggaaagcttgcaaaatagacagaggctaggggaagaaggattgagtgtgaatatagcctcttataaatcgagaggaatggtctgtgtcttctgatcatacagagataataaatatggaaatgatttcaaactaacaaagcaaatgtgcagaaaatactgagaatatagtgggcaggatacctgagttttggttccatctctgttattgactcattgtgtaatctgagtcaggtctgttctgctctctggatctcaccctttcctatctgtaaaatgagattgttggattagatgatctccatagaggttctcacctattctgacattcaaaaggactcctaatttttcttatataataataatatatatgatctgtagagtgctttacactttatatgatatttttgcatctgttatctcatgtgagaaaagcactggactgctggactggcaatgaggacacctggattcttgtctctgttttgacactgattcatggtgtgatcttcaagcaaattctctgagtttcagtttctcaatctgtaaaataggggggtatgaagattggactaaatcagtaggtctctaaaatgttccacaaagccctggggtggggggctcctacagagtttcgctaaggcaaaccacaacgctaagcctgcatggaagaggagaaaaagagtggcctgacaagagaagttcccagtttcctatgccaaccccaggcagattacatttaattttatctgatttatatagagagtttctatgtaatgttttattcttaaaaatagtttactataaaaaactcaactggtttgatttttaaagattgcacatataagtgagatcatgcagtcagtatttgtctttctatgcctggcttatttcacttagcataatgtcttccagcatcatctatgttgctgcaaatgacagacttttcttttcattaaaggctatatagtattccatcgtgtatgtacaccacattttctcttttgtaactttcattttaggttcaggggttcatgtgcatgtttgatatataggtaaactgcatgtcagagaggtttcttgtacagattatttcatcacccaggtaataagcatagtatctaatcaatttttttctgatcctctcccttctcccaccctacaacctcaagtaggccctggtgtctattgttcccctctttgtgtccattacaccacattttctttatccacttatccatccatggacacttagtttgcttccatatgttggctattgtgaataatgctgaaaaaagtcaaactcatagaagcagagagtagaatggtggttaccagggactgggaggcagttgactgagctaggaaaagagagataataaaagggtacaatgtgtcagttatatagaaggaataagttatattgaactattgcacagcatggtgaccatagttaataataatgtattatatgtctcagtattgctaaaagagtaaatttaaatattctaaccacaaaaaattattagtaggcaaggtgatggatatgttaatttgcttgatttaatctttctagaatgcatacatatatcaaaacatcccactgtaccccataaatatatacaattattatttgtcaatttagaaatttaaaaacttgatttagatgagctctaaggccttaagtattaaagtattaagtattaaagtgatatgtaaccaagtatattgtttggtaacttcatttttgttattattttaacaaaccaatatattgtgaatatacttccaagtgaaaagaaaaaagacattgcagtcatcactaataactgcaaaacattcctttgcaagaatatggaataattcatttaatcattcccctaatgttagacattcaaatgtttccaactttttctatttaaataatgctacaataaacttctattttgtgcttattgtattattttcttacaacacatccctagaagtggaattcctagaagtttatacacatttccaatttttttccaaatatatggcaaaatttctctctaaagtatttttattcctaccagaaatacctcttcaccaacacgtagtatttaatctgtaccaatctggcttaagacaatgatatttaatttgtatttctgtgatttctagctaaattaaataatcttcatatgcttattggtcatttgtacttctaactgctttctcctgtctgttgcccatttttctattgtgctgtttatttttatatatcgaatatattgaccattggttttacatacttgatgctaataattattcttagtttatggtttgtctttgagttttataatggtgtttatttcacataagaaattataaatgttttctaatgaaatttatcaagtctgtcttcacttatgttttcttcattgtcaataacttaaaatgaccttttctacctttaaaaattttgaaattttcctctgtattgtctaatagtacttacatgatttcctcttttaaattgacatatttaatccatttggaatttattttgattttaactagtaatttaactttattttcttctccaaatgattcactagttgttctgacattatttagtgaataattcatcctttcttcactgaattggaatggcatattccatatactgtgtctggttttggcttttctgatctcttccactgatcaacctaagctggagccagtatcaaactgttgtaatcattatgcctttagatactttaaatgtacagcagggaatgtcttattactcttatttttcacaaatatcttggcattgtctcatgttttattccttcagataaattttgggattattttgtcaagattttgtttgagttgttttaaatttttagatttcattgggaaagaactgaaatccttgaaatattgcttcttcttagccaggaatatggtacaactttgcatttaattcagttctttccttaaataccaccatgaagttttttgttttgttcatataggtcctgcattaacaccatatatataaagtgtgagaaatactacattcttcaggattctctgtaggttaacaatgaagatgatgactcaaccctttctttgtttgcataatgtgatgccactaatagtgggtaacttctctgccttacctcctctgttccaaacaggatttttcagaatgaacaaattaaaagaatcataatcagacactaaccccaagccatactgcatggcagcaccaatgggactgacagaaaacaacagaaataggaagaaatcctacagagaaacaaacttgaaagctgtctcatggcctttgaatcatacttaagttttatgatggaaggatacgactatgaagaaagacacagagcaacatcagacagtcaagaatttcagagccagctggcatgcagtggacctcatgccagcccattttatgactatttaggtagtcaagggtttaagatttttctaataagacagttattatgcatttcaatgagtgatttctttgcagctctagagtgtggccttacctacttcaacatgagaagatttttgtattttgtcagtcatttcacaatgacttttagtgagcccttcattatagactgtggatacaactttgctgttggaaattaacagtgtcaaacaactgggtataatgtttgtaatatctgaggagggggagctgcctaggaagttgtattccctgtgttaatttttcagtctcttaggttatagaggaccttctagaaccaccttacagcaggattacatcccatttacacagttctctgtcacttgaatacagagaagggatccacaaggccatatgcttcctagacaaagagaaaagatttctgccacactcagaacgctttgtcttcagactataatcacccacaccatatttcctttggatccactttccagatttttgtgctggcactaacaccaacttgctgtggcttggggcatgtaatttcaatactttgtgcccattttcataagtgaagtgtcaggcatcacattggacattttaagattctttacagcccaatgattctgtgtttctaattaggcccaatgggttagagctaaaaggaaacagtgagtttcctggaaggaaaggacatataacacagtccagaggtaaaatgggctgtattcaagaaaagataggacaatactttgcagggatgctgcagagaggattcaagccttgtatggaggaatggatgtgatacaaccaaaaagtctttaaaaattctttccaactaatctgagatttgtaaccttatggactgtgatttgcagcaaaccaaggatgtgataaagactagtattgtttctagaatgcaaggatggttcaacatatgcaaatcaatagtattaacagaatgaaggacaaaaactatatgatcatctcaatagatgcagaaaaataatttgacaaaattcaacatcattttatgataaaatctttcaagaaattgggtattagaaggaatgtttctcaacacaataaaggccatatcagacaagcccacagctaacattatattcaatgaccaggaatgagataaggatgctcactctcaccacttctgtttaacatagtactggaagtcctagccaatttcatattaatgagcctcattttcttcatcatagaatgaagtatataataatccctgttatacttactttgcacagattattattattatttaattattattttgagacagggtctcactctgtcacccaggctggagtgcagtaccacaatcacagcttacttcagccacgacctcccaggcataaaggatcctagcccctcagcctcctgagtagctgggagtacaggtgcacaccaccacacctagctaatttttttttttcatttttttatagagacggagtctcactatgctgcccaggctggtctcaaactcctgtgctcaagcaatctttccaccttggccttccaaagtgctgggattacaggagtgagccactgcacctggccttgcagattattattaaactttgtaaactaatcaaatgagagtgattattgttactgttaagaactctgatagcctcatccatatatttggagaaattgaataaataataggaaagaaataatagcatcccaatgattttaccttggctctaccatcatttggggaagtgataattcagataggagaagtgacttggaagcagtcttgagagattgcctgttccatcccctatctttgtccttaaaccaaattgtacagataaataaggtcttatttttaggacttacagaaaaaagattcctttcatatccatctttgcaatcctcaaccacttctgtcactattatgtgtcatttcaaacattaaattcctcattctgctttgaaggaacacatgtgtcatgtgtacccatttgtatgttttggtgtgttttatgctttatgtgatcacccacatatgcacagataattccaaaatccagtgtgtgggtgttgtattccctgtgttaattattcagtcacactcaaacacctatgcactcacacatacatgaatacacacatgtacattagcatgtttatgcttatgttgcatgtgactggcaacatcagtgcctttctaaggcaatgttaactaccttgagttttgggagagctttagagaacaaagacaagagactaaatgattctagatgtaagagacaatgttgcaataagttactatcctaaaaagacagaatacagggacaagagactattattttggatagtttcttgcttaccagtaatacttaagtcctttacattaaaaaaaaaaaactctgtaaatatattgcagaagaaatccagacatccttcaagattcttagagctggaaaagattttaatgactttccagtccaatctatctcatgtaatcaatggggcccagagaggcaaaaggtcttgtccaaggtcatatagtgagttagtgataaggctgaacaaggattcagatgttggggcttccagcccactgctctttctctcatctgggatttgtgtatttttgttcattagagattttcctctgtaacctcaatatccaatgcagggccttgcacataatagattatcagtaaatgttaaattaatatgtcatggctttggttgtactgggcttttgcacttactcctgagtaaattgtaaagaatatctacgttttaggttgccttgttttagaccaagaggtacccagagaaaaggtgtgaactatgctaaggaaattatccgagttccaaattgaaaaaaaaaaaaaatcatgcttttccgctataacctctctcattcacagagtgattctctttcagaagggcaatctagaactattatgggagccatattccattggtggtgcaaccatttcttgacaaactagggtccaagaaagtattttcctggggaagatgagatttctcaaagaaggcacgcactttctaacctaagcttatttcagtaatcaatgtaacaagctggtcttgatgattgcagcagtaccaatactgtgggagtgtaccagttctagaacagctacaacattggaattgaacgcactagaattggatacaggacctgtttttgaggagctaacacccaaaggctgaacagcactcgtagcaccgtcctttctgtgcacatatggtagtcctcagtttgcaacagaaataaagctgttagcaaattatgtgttctatttatgcaaataaaatcttgtggtatgctagaaagagcactggcctggagaccttagttttctcatatgttaaaaacccctaacacaggcctggttcatagtaggcacccaataaatagtagttttcttcctttgggggcctccgattcagtgtgcttcttcaggtaagtcacttccctggaactcctccttggaatgagagttgtactgttgtgatttttaacagttccttcaagccaagcattttggaatcctttcataaagggagaaaggaaggaaagaagaaaggaaaattaaaggaaaaagaacaaataaaacgttaaaaaggaggaaaggaaaaaggatcctttactacaataaaactaatcttatgttcttgcaagtagcactttaagtaaaagaagttctttgctgacctggttactactgaacctactacataaaatagcctactataatagatgcatttatgtgcctaatcttcactttttaggcttagtaaagggagaggaaagctgatgtatagttaaatttatgtttttagttgtttttttttctactctcaaatatcaatcactctttagtttctctttctttttccgaccacaagcattcttcctctgcttaaagaagcttccctaaaatcccagtctatccagtaagccaaagcacagcaataaatttgaggaaaaaataccagggacttagagacagaaaggagtgaggggatgcagaagctgaagctggagcacggttgcaagcatgagaagttctgcgtgtttcagagcagccaaggatgtatttttgcctattcctgctggtgactctgtgtgtctatgcatccatctgctatatttacatgtttagtcagtcaatccacgtttgctgagagcctgctgtgtgccaggattgtgctagcgtaaaggagcaaagtattgagcaaaatatgtttgagcagctgtaattctgaggatctctaggtctgagcatgtgtatgtgtgtgcgcttctatgtatctgtgacaactccaggtgttcatgacagtgatctttgttactctgttggcttcatcgaacttccttttacttgctgtgattcactacatagagtgggctttatctctgatttttataacctgcaagactgggggtatgatcaccagcaatctaaaaacagttagaaatcccatggagttatcttttgtagaaattttcctctactaatattatgaaaaataagcatcttattagctcgagtgtaattctatgcatgattacaggtatcaataggaagaaacattgactgagttcaaatctcttctacgccatgctaaaggggtgacaagttccacaatggatcattttctcatgggcatttctgacttttggtaaaagtagagcaccttattttaaaaaccattgagtagtcctaatagtggagatatcatcaggatctgaattgttcatccctaaaaaaaacaccaatggaaatcaaacaatatagtgccaaattaaactgtttgaatatttaggttctgtatgatcaaattgtttggtgccatactctgtccacttttttcatgtggtaggatataatttcatatcttttctgttctagaaatacccgaagaaagagactctggaaactcattatcaggtctatcaactcttgtatttgttctcccagggaaacagaagtacctgtgcgccagcagaaatgattgcactattgataaattccgaaggaaaaattgtccatcttgtcgtcttcggaaatgttatgaagcagggatgactctgggaggtaagatacttttctttctcttcctcctccttcctctctcccccttctccctcattttctagtctctctttagaccagattttcttctttgatgcttccaaggggaccagccatgctctagacacaggctgaccctttcataggcaacgtggccatcagccagctggtgccttttttttaatccttatctataccaatccccattccggggctcagcattagagcaggcggtgtgaagcagggatcaggagccaacagaaggtgagtgaggatgcatctgactgggcagggcccccaggggacttaatgatactggcctgatgttgttcagtggtagctaggatgagagaactaagaaatccagaacagtcagaggtgcaggatgacccaggcataggcgcaggatgacccaggcacaggctgatcctgaacacctgggaatatcccttagctaactgctgcctatgttgtagggccagccacctcgaatgagaagctacttctctttggagcctgtgactaggctgccacacagagccaatttcctatcctatctctcccaaagatgagcaggtgttttaataatttccttttctttgcaaagctattgaccatttccaaaagcattttttttcagtagcacagtaacgtgatagatggaagatacagctctttcaagggcgttcctctatcataaggctctctgtcccacaaacctgtctaccatgagtgttgtcaccattccagaaaggcttgacatcagttgattgagacttatattttccctctccaaactcccccatctcttcatgtttacatctgcccaatgccagggtcctcgctgctgcctgctacttccaaaaagatgtgtctttcatgagaaaaacaagatcattaatccacttcgatttggaaatggaatttgaagaaaggcaagcctatttctgagtgcctgcaactgtagcctcatacccaattattcattattagcctggaaaacccaagtgcctagaatccaaccctctcccctctcctcttaagtctaatttagaccagttgtctatctctggctttctgtgaggtgttcaataccttgtctgcctatgtgcacatttatagacaacaactagttctcttatcctggagcagggccatgtgtggatcttcatatagataactatatcctccccatcctcacagggcagtagtattatttaaacagaacaaagtacctcacatgaattgacccaggctggatgagagacaatttcaaaagaatcatctcaagtagcgtccagtactcccaaacatcacaggtagatgttctgtgagtggctttccaagcatccacatcaaatgagactcagatatctgagaaaactcaaccttgttttggtttgcttggtgcaccccaaagaaatccaacaattgaggtctacagtggagaagaagtaggactggggtcagggagtacagaggcaaaggcaggaagggtgacaaagtgattgacaagaaaaaatgttctccatatgaatgttgcagccccatgttgagggttcttatacactcaactgtcaattatttagccttctgtgaattatgtatagtataaaagatagggactctcaagtagggaacctcttggcttgccatctggcaatatgaattgcaagtccactttgatgcaggtaaagtttaatggtaacaaaagtcctcataacatttggatgcaaatcttaacattaattccatgtctcagccaacattctccattattaagcagcctgtgatgtgattacagtgaaccacttttgaaaaggagcctgtgtataacagatagtttcactatactatataaccgtcagatgcaggcttgtaaattaatttgttggtgacaatgtttcagtacattttcaaattgattcattggtatagtactcaaatttgagtgggcttggtgaacacaatgaagacaagctgagaagtgctgtgactggccttcatttcagttgcaggcccatgatattttgagtgtcttccatgtacaaggcaccatgctaggcattagagcttgaggctggcaaacttcaggaagtgttcacaagataccaggattcttgatgttgtgtaaatggccttgcctttagagtcaggcagatctagtttaaaggctcagctcctttatttactgtgtgcccctctgagcctcaatttcctcatctctgatttagaaataccatcctcatagagttataatgagtatcagatgacatgatgaatgtgaacatccttgataaatagcaaaatgctagacaaatatgggggcttaatatgacattgaggtcactagtaatttagctggaaagtctgtaacacagcacttcccgatggcttttaccctaagtaacttggtatgccatataatatgtaacagcaccaacaggcagagaatcgccagaaaacactcttgattacctcaaacgaaaaagtaccaccaggatcctgttcagaagctaattttagtaattaagggaatcatatgctatgttcaaataccatgccagtaaaaacccaattgtttaccttcttaaatcactgcttgaagagcaaatctttccattttgctgaatgaacttatctccacgttccctgccctactgacacaaccccctcccaagtttattgttaacttacacattcaatgcacagcacacctttactcaaacaatggaaaagaaagaaagtgtcaattcaaagtggcccttgtctattccttaaggagtagacttccattttcatcagatttggatttagcatagacatattgattaccttgaagaagaattcatataattttatcttctgattcccatcactcaaatcaaaattacataatatattccaaaatggcaactaggaatgtggccttgggcaagtcccttctctcctctgatgcttggttttcccatcatagaactggaattgtggcttcaccgaggacctttctggtgctaacattttgtgattctatgtaaaaagccacacagaaaggattgtttttcagccctttcttagattgtctgttccctgctcccagaagtatagatagtgagacttgagtgctttgatacatcgtaattgtatctacctccattcacacctacttaagatatctgtctaaaagtagactagacagattattcagagagtggagggcagaagggctgtctctgtatcttaaagaagctggcactcttcagctgatggctgcttggtcttgaggcctcaagatctttaatctggctttctctatagtgtttcattcactgtttggtgatggaatctcttcagttcagagatacttaatagatatagctttttctttcctgcttccaggcctacctacctgtttcttgcttttttttctagcagctgttgttgtttctgaaagaatcttgagggtgtttggagtctcagaatggcttccttaaagactaccttcagactctcagctgctcatccacaacagagatcagcctttctttgtagatgattcattcctggctgcatttgaaaaccacatattgttaattgcttgacgaatttaaatcccttgactacttttcatttcagaaaacacttacaaaaaaagtccaaatgaggaccttccctccagtgaattagctgtggctttctcacagtccatagttaggataaatgtaaagccatttctcatttttctccgcactttccaagggtacactccttgtttccaagatggaatgagaaataaagaagtgcccttcctgccatcttctcccctgaccctttcctccttcccactttcctcctattcctccccaaacatgatttatttctgcgttttgcaactcttgagttctcagcatttagtaaatggtgttggtccctgttgattccttcctctcctggaccatggaaggtagtaggcctttcagaaatttcaggtagcagccaaaccccagaagaagagaaggaacacagagacctagaccatgtgagaacctgaggtgtgcagcatttacttcacagattcgtctagcatatttgagaggtgtctttcctactaggagactgaactctgcatctgagaataaaaacttaacatatctacaggttttgacaacctctgtgaattatctagttgagaggatggctcaaggagcctattgccatggtctgatgtcgttatggacgctatgaacatccttgcagtttccattgttgaagacagccctgatgccagctgtctcatcattccccatgttcaagagcatcccagcattgctacctcaggatcccatgtcctgaatgcaacagagtgatttcgctgctgaattactattcatggcatggctcttcacagcatttattcatccatgtatctatccattcatccttccagccagccaagaagttcacgctttcatcttttcatccatttactcacctatttattcatttagcaaatatttattgagtaccaactatgtgccagacactctgctaggcattttggggaagcagaactgaataagatactattcctttcctcaaaaatttgagcaagaggagaaaggaagtaatgaggaatattccttagccataaaggaaaaataagaaatcacttggaagaagttaggtgagatggaaggaaaaggacatctaaggtaaagcgtacagtttgaataaaggcacagagacatgaacaaaatgcattgagggtttgaggaacagcaattggtttaacatggccagagctggggaaatggtaagggcaagctgaaaccacattgaaagcaaacttggttattatactaggtagtttagacttcaagcagttgaaaatctttgagcatgggataggcatgatgacattgtgtttatttgcatgtttctttaaagaaaactggcagcagcacaaatgttttgttgatgagggtttaaattgtagaaagtgagacaattttaggaaggccagctagagagaaatttctagcatcaaattttgctaaacacctaggatttgtagttacctccatttgggttgttacctgcaagtactgaccacgtatatgaagaagtactggtttagaccaaggcaattggcttgtataagaggcctaccctcataccaaaagccagtttccttggtctaggccagtgtttactggtatgtgtcctgagaaaactagttccatgacatgttccatgaaaaatatgatttctattgtcaaataagtgagggaaacttgcatatcatggtcctgctcaggaagatttacaatccttattagcatatcacaggtcctggtgaatactgcggtaaagtaaccgaggagctttgtaactcaggattcccgaagttgattcaaccacaggacctcatttattcacataacacctgttatcctacaaaaccactgttctctggaatacactttcgaaaacatgggtatagacaaaaactctatcctataggcagagaatacctatacctctagctcaggtcatcattttgcagatgtgtgtgtcattaagaatcagtcaataatgcattaatgatcaaaagcagaccatccttaccacatggtgcataagattatgctattatgctattagctactaatgccactaaagttaattatgttgggtctgcaacgttgtcatacacaaaggataggatgcaaaactgtcctaggccaaagcatggttattgcccaagttatctaatgtctgcaggtacatattcctggcctaaggattgtgctaaagaagttatttctaagaaatatagtgacttccagcatcatgcagaatgaccatttaatattttgaatatctagacattctgctgtagaatttaatagtccttttatacactgtctgaccaacattttgacatttactcagaaccccatcacagtgctaccacataacctcattgctaaagtgggaggcctagaaatcacagatttgtagaaaccatccaatgattgaatcccctctacttcctgttcagcaggcagcagagtgtcataaagaattaacaacgtggaactcagttactgggatttcttccattctcctttgattctctagactagaattccaaagaccctcaggctggtgatgcaagtgggaagtctcatttctgagaagtgctgcttcctacccacaattctttgatagctgagtgctttagctgatctgcataactgaggtgtgcaccaaggagcagaattactctataaattttggcatcaacatgtgcaacttgtgactcagcactttgaaactctggggatttttttgtttggttggtttttgttttaagatgtcctgtggtatagtggaaatagtacaatagactcagatacagagaggccttgtttctagtcttggttctgtcacttactatcttgatgtccttgcacaaatcaccagacctctctgagcctcagtttctccaaccacactgtgggaataataaaatcttttttacggcattgttgtaagtatgtagagaaactggtacacagtaggcacacaatcaatgtcaccgtacccttcagcccttcttttgtggatgaaaaatggtctttgtgctcccagtcaccactggggtctgttctctctctctctgctgttacagtgtggcttttggttcttgtttctttgttctttggtctgtaaattacccttgaaacaacccttgaaatttccactccatgacctaaatcgtcatccctaaattggttacatacatatttggtgacactttggaggggaaaagctttatgtctctctaactgtagttcttaagggaatttgcatatggaaaaaacagagactgcgtctcttaattcctccaaaccaaattatctgggatagcacatatatgttgtactctgtctctgagcatttgctcttagagaactatggttagagcgaagtaaatttttctaatcataaaaattaatgataccgcatatctgatacttgaatgagtacctccttgtaaaatttatacttaaatccttgagtttttaaagtgtaatagcaatagaaagattttattgttgtttacttttactgtgagtgctccaaaatccctcagttgctcttgaaagagcaagatgatgccataggcaatattttccaaaggtagtaggcagaaaactgagtacacagcacacaataggccatatatacaaaagcaagtattttgcaaataataataattcaggaaaaaagcttcactttcgttggtaacctgtttgtttaaaaccattttattatttattatttaaaaagagtgtcacttgttacagattgtgggatgtgttccttaagatcacaaaaatgtaaaatattttctttttatactgaacacatgcatagacaacttacctgagcaagctgctttttggagacatttgcacatcttttgggatcacgttgttaagaagtagaactaagggaaaaacacgcagccacccagaaatcggtagagccttcagctcatctgttattaatatttctgtgacaacagatatctaggaagtaaacaggaaattgcatcgctatcctgcatcaccttttttggaatcaggttccattcttctcagtccagttcaaccttgtgatactttttagatctcaaccaaggcatagaaatatattttcccttgcttaataccccatggaaccaatgcccctgtggttgaagtaaaaattgattgttgagggacatttcagccctctagcagtcaacaattaaaaacatgtaagcaccgagcacctgcagaaaacttggactggcatttggatctaagaagaaaatctgcatcttgaccaagatgaaaagtcaccagcccaagcttgtgcagtgaagtgtcatgttggccacaatgaaactgaaagagactgatgactctcctcagggtggaaaatgaggcatggaagctttgattagtgagctgttaggcacacagacattaatttcaaagcattctcatctccagtctgagtaataatgcttatagtattatgcaattgtttggctgctgcaagaaattcagcagactccaacaagtagtctttcttggtctctgagtgactgtaacttaaattctacctcccttctcttctcctacatcttctcactccccaccccacccccacatacacacaattcttgtccactatgttcagagagatgcacgcacacatatatatgtatatatatagtatatttgtcaataaagcagaaaagaagaaaaaactccaagtaaacaattttccatttccccatctcacttctgtcttacaagtggataggaaaagaaaaacccccagtaaaaaatggcaaccgcccacctccccaactttacatgctgcttcctatgttagaggatctgtcttaggcatctgattatggagcctgctagatacaagcccgtatttagactgctacagtcaacaatgtctctctttcatactagaaaaattccgggttggcaattgcaagcatctcaaaatgaccagaccctgaagaaaggctgacttgcctcattcaaaatgagggctctagagggctctagtggatagtctggagaaacctggcgtctgaggcttaggagcttaggtttttgctcctcaacacagactttgacgttggggttgggggctactctcttgattgctgactccctccagcgggaccaatagtgttttcctacctcacagggatgttgtgaggacgggctgtagaagtaatagtggttaccattcatgtagttgtgagtatcatgattattgtttcctgtaatgtggcttggcattggcaaagtgctttttgattgttcttgatcacatatgatgggggccaggcactgactcaggcggatgcagtgaagctctggctcagtcgcttgcttttcgtggtgtgctgccaggaagaaactttgctgatgggactcaaggtgtcaccttggacaagaagcaactgtgtctgtctgaggttcctgtggccatctttatttgtgtattaggcaattcgtatttcccccttaggttctagccttctggatcccagccagtgacctagatcttagcctcaggccctgtcactgagctgaaggtagtagctgatccacagaagttcagtaaacaaggaccagatttctgcttctccaggagaagaagccagccaacccctctcttcaaacacactgagagactacagtccgactttccctcttacatctagccttactgtagccacactccttgattgctctctcacatcacatgcttctcttcatcagttgtaagcctctcattcttctcccaagccagactcaaatattgtattgatgtcaaagaagaatcacttagagtttggaatatcttgttctctctctgctccatagcttccatattgacaccagtttctttctagtggagaagtggagtctgtgaagccagggaaacacacatgtgagagtcagaaggactctccctgacttgcctggggcctgtctttcccaccttctccagtctgtctaaacacacacacacacacacacacacacacacacacgctctctctctctctccccccccaacacacacacactctctctctctctcacacacacacacatacacacacacttctttctctttcccctgactcagcaacattctggagaaaagccaaggaaggacttcaggaggggagtttcccccttctcagggcagaattttaatctccagaccaacaagaagttccctaatgtggattgaaaggctaatgaggtttatttttaactactttctatttgtttgaatgttgcatatttctactagtgaaattttcccttaataaagccattaatacaccaatcgtattttcttatttacaacagactgagagaattaatgctgttaacattggatcttttttcttttttttttttccttttttttctctctcgtttgctttccaggtcatgctgacctgttcagcttggactgtttcacatttgtttttaatgtcagtttaaatgtaattgtaaaagcatgtatgctctaaaatcatgtagttacttttttcagtggaaaagcctggtattcgaaagcatttccaggctctgcaatttcatatgagcaggtttttggtaaaatcttttgtccctcactcagggtggtatctggacagtgagcccctttcttctggctcagtagtcagagagaggagacttggagacagtttctgctggatcctgtgctttggcaaggatgtgcagcattgcatatcattctatcattaattatgtttactcctccatgaactaaaaaccattagactaaatagtccaacataaaccttgaaagataaaatttgatattcttttgcctggccatttctctgacccagaattggggctgggaggggattggagacttgggggaaagaatcaaggagccttcttgcctgggggaatttggcatgcacttattaatcccatttggttgcactccctactaatccctcactccatacctgccaaggattggctctgctccctgcttctcatccctgtcctagttcttcctcacctatctccatttcccactactgatccttctctccagtaagatgctattcaacccgatgaaatataaagagtagcaccaccctggaagtcaggataccttagttttagctcctgctctaccattatctagctgtgtgacctggggcatgacttaacctttgctcttcagtctgaacagtctttaagaattggtttggaggaggaaggaagggatagacaagatccaaggcctttgaactcttttttggaaatgggtccttttcttcaaacaaaatttgatgcagagtcccaaatttacctacagaataaaatactgctgttcttgtttgaaaggaagtggggtgcttggagccacatgctcaggcccactttgccccctctcaggaaccctcgaaaaaacttataggacttataggactgttggggatctgccaagtctctcttatgttacatttcagtccttgtgaaactctatatgtttcatcagttcactttttcagaaagttcacctgcttggggtaaaggtcatgaagtggagaatgtggggctcagtaactagcaatagtaaaaaacatcattgattggcttgcagaatttactctgttctaagcatcttacacacatactcatccgaaaactcacaacaaccttgtgaggtagatctgttattatcttaagattctgaaacctgccagcatgactctcaatctttgacttgagaccagttgcccaacatggaaggttatacttttcacagtttaccaccataagcagtctttcagagtgatttctagctagagatccattcttagaaaaagtcagaacctgcccattagcatacactgtcacatggtgcagagtaccttcactgggttcatctcatttcctcctaaaaatagtcctatgcagtagtccagtcatatcatcaccattatatagatgagaaaaactgaggtgtaggagaaatcaagagatctgttcaaggtcacacattccataagactctgaataccaccatcaagaataataaaccttttatgtgaaaagcattttagaacttcagtgtcattattgcattctgcctcctggagttcagtgcactttttcaccatgctttaatcttggagtcctggtggtacagaatctgccttctactctcagacaacaccacagtgtctttatccctcataacaaacttatgaattaagtaatgatattatccccattttacaaattagttaactgagataccaagaggctaagtcttgcccaaagtcacacagctagtcagtgatagagccggagttacaaatgaggcatcctgactccagaatatttgctcttaactactactctttatacatatgtaaggaaactaaaagcaaaagagggaaagatgtccctgaggccccacagtgagctcccctgactcacaatccagtattcctctgaccttctaatcctaaagttatacagtaaggtcccttgactctaatcctagtagatggaaagatggctggcatgatttaagccagaggccacaaactggcttccccagagccagaattcacctgcagaattctgtttgtccagcacagtgtttgtttagaaaattgacgtagactgcccctaggcagggcatcaatcactgtcattgtccccagccctccttatttatgtttgccaggcttttttactcatttatgtgtctgcctgacttgtgaaggtatttgagtttatgacttttagatttaagcattgcaatatataagcactgcacacatgcattcacaaaagtatagcctagtctagcttcacaaagaatttgtagccctacaccaaacacacctttatgtttacttagtgtttagaattagatttaagatcagaatttagtttcacaggcattcatgtgtggaagaacctcagttattgttttttgtttcatactgtctcacccttgctttccctgctgtgtctggacccctgtcaatcctgctttctgccattcttcatgcctgagttagggcccctgcaagccattcactggttaatctttaggaatgaatggagagtgaaaaccagtttggagggttcactgtgtcccaagcatcctctcatttagttctcataagtgtcctaagagacaggtagcagcacattcgttttataaatgaggaaactaaatctcagagaagctgaacaaagacctcaaagtcattaaggtagtaattaacggagccgggatttgaacgcaagactgttggactccagagcctattcttttgccctacaccacagttccttacaaggaagatgtattcattttctattactgcataacacattgccacaaatttagcagcttcaaacatttatcagctcactgttttgtaagtcagaagtctggcacagcatggctagattctcagttcagggtctctgaaggatgaaactgatgtgtttaccaggatgcattctaatctgaagctcagggttctcttccaagctcatgtaattattgcaggattcagttatttgtggttgtaggactaaggctccctcttcctttctggctaccagccaagggccattctcagctcttggaggctgccctctttccttatcatgtggaccccaacgccttcaaagccaacaacagagactcttccttgtgttgaatgtttctcactctacggatgtctttcctggaggatcccagtcccgtaagggctcacctgatgaggtcaggtacatcaagaatagccacccttcaaattcaactgaattagcaccttcattacatctacctagcctttttacaacagcatctaggttagtgcttgactgaatgactggaaactaaggtctcagaatctcggggaccgtcttagaagtcagcctactacagatgttgattcttttcatgtgtcaaatttcatagtgagatagggagaacagaaacatcacatccttgaccttaggtaaagggattcaaacttcctaagactttggaaacttcacgccactttcaccttttccttaatcatggttgagaaggcctatatcttggagtggccaggagtgagactggaacagtacctaaaggttaaggacgctaaagaagttacagattggttacatctgctcctccctaggaatgatccatggaacctgatttgaaatttttttctctggtgctatagatagctcccacaggggtctaatgccccagggctgaaaagttagttccccataggatccatccaggcatgatatcaggccaggtgttacaatctcctaaagaggaggtatggactggaaagccccttgccaatggccctttcttgtcactgctctgacccaagactaacagggcagagatagtgaactcacatactattaaaactatccacttatacttccccctttctctttgctttatcactccatttaagtaaaccaatgagtctctgccttgacacagtggcaagctgacctgtatcttatatgaaagaattagatttgactctggggctcaggtgcagagggcaggaggggcataaggatggccttcatggaagaaaagaagtccttggatactgagtaacagctgagactagcaagcctcattgtccaggattccaagtcgtctagcaacatcctggtctctgctgcagacagaacagaggatcccccggcagaatgaatggagtctgatttcaattacgttcagtatagtcactctctttaggcagagaagccagaacacctggtgcagctagggccactgtggtcacagggacaagcacactacctgggtcctggaggcaagtgggaatgcagtttttcttccttaagcagatgccatataggcctggggaggaggatgtgagaataccagccaagttctcattggcactatacagagaaaggggaattatttcatcttgatggattctccccacagtctctgcacatattgatcttacttgtaatgagtttgcttaggttcacgagtcatcatcccagggagatctgagtcattggtgggaaagtcgaggcgacagattatatctcactgatctcactgtcaccaattgctctgtgtgtccctccaccttttgaaaaagtccatggattcatttgtgtgtaattcatttggatttatttcttctttatcaatagctttagtggggtattgcaaatgggaaagttgccccagagaacagtgtacattcacagcattattcagtagaactttctgagatgatgaaaatcttctatatcttatgttgtacaatataatacagccactaactacatgtagcttttgaacactggaaatgtggcaggtgagactgagggattatatttttaattttttaatgttgtaattaatttaattttttaaaatttttgctttctattttatagtttaataattaaactaaacttacgtagcccacatgtggctagttggctactatactggacagtacaagtctagaaggatctcagagagacacatgctgagatacagcaggaataagtcaaaaagagagccaatgtaacatagggaattctggattgggaattagagccctggctctaatctcagctctgccactaggtgaccttgccctctctggcttcagcctccccatctttgacttgaaaggttaaactaactaacgtcgaaagtcccaaaatggtggctatggactgaattcaattttgggatacacaagtttcaggaattttttaaaaatctattaatgccttctaggtgtgtgtatgcacgcttgcagacatgtgcccatgcacaagcatgggaaggcagtaaggcattcatttcaattcaccagtgtactaaccattcacacacacacacacacacacacacacacacacacatgcacacacaccctactgtattgcctatgtagagcctgaagatcttttaatctgtcaccattggataagataatttctaaggacccttcctgttttgtcatgctgaaaatctttaagccactatagtgtcccaaatctattccagtttgggcagatgactggagtattctcatagcctcctgtctattcccttctggatttgatactagttatgaagtttggagtcaagggtgaagaagggaggcagggatgatataaccccagccccactcctcaactctgcttttgagttagaagtagggttcagggcttcagattccttggggaggcagtagagagaatatgggctttataatcagaagatgaggttcagatgattgggttctcaccttttttatagctgtgttacctcagtttattcatttgtaaaatagggataagaaatatctttaacctcctaagatcatgtggaattaagtgatgtaatgtgatgaagcgaggcacgcagaaggccctgaaaaaattagtagttacccttaaggggactaaatggtctggcaactcccgagctcaaagctagaaaggtccagtaatggggaagatggggtctttctgtaggaactgtagcaggggagcagatcctgtaggccaccagtctgtggagctgtgtccaagaactcatgtttgcaataagcccaccaaatgacaagttattgtggggttcaggcctctaactcaagaagatggtcttggcccagatcataccttgcagcctgtgcctttggtgggatgtgggtgttggcagtggctatgcatatctccttattactggctgtgccaaagccccgcagaaatgattgttggacaaagtcatcttgcactcagggctggttttccaggcttccttgttattttcccctgagttcttctgtgttcctcttgcaacaccaaccccactattttcctcttccctaccctagttgttggtccaaacatgtaatccattcttgcagtgatttattgggtgacaccatgactggagtttgcattgaaggacttctttttctaattagaactaaaagtcagttccaggctgggtgtggtggctcacgcctataatcccagcactttgggaggccgagatgggaggattgcttaaggccaggagtttgagtccagcctggacaacatagtgagatcccatctctacaaaaaatgttaaccaggagtggtagtgtacaactctggtcccagctacttgggagactgaggagggagaattgcttgagcccaggaagttgaggctacagtgagctttgatcgtgccactgctctccagctgggtgacagaggaagatcctccttcaaaaaataaataaaaactaaaaaaaaagtcagttccaggttgtatcttttttcacaggggccagacacagatgagagcaggttttgttgtatttatccatttaaattgagcaataaaattctctctttggtttctacctttcttatttattattattatgttaaagggattaaagtggttcatggtctttctcagtgcaactgcttatgctagacctcagaattatgaccttttcaattatttatatttctgtctatataaatactggaaaaaatagtacaaagtaagcatcggaatgcctaaggacctctaaattgtgtgtgtgagcacatggggaagatggttcttaaggtttgagttttggattattgtggttgtcttaaataatgttatttctatcattctttccaatgactgtctcctagcatagttcccattttacagactgatggcagaggcagaaagattctctcacttctttgatactattgaggacttcagcctttcaccgctcttctcccctttgctaaaaaagaaaaaaatcaatatgtatgttacagtgcatttttttaaatattttttattatactttaagttctagggtacgtgtgcacaacttgcaggtttgttacatatgtatacatgtgccaagttggtgtgctgcacccattaactccttatttacattaagtatatctcctaatgctatccctccacccttccccaaccccacaacaggccccagtgtgtgatgttccccttcctgtgtccaggtgttctcattgttcaattcccacctgtgagtgagaacatgcagtgtttggctttttgtccttgagatagtttgctgagaatgatggtttccagcttcatccatgtccctacaaaggacatgaactcatcattttttatggctgcatagtattccatggtgtatatatgccacattttcttaatccagtctatcattgatggacatttgggttggttccaaggctttgctattgtgaatagtgccacaataaacatatgtgtgcatgtacctttagagcagcatgacatataatcctttgggtatatacccaataatgggatggctgggtgcaatggtatttctagttctagatccctgaggaatcaccacactgacttccacaatggttgaactagtttacagtcccaccaacagtgtaaaagtgttcctatttctccacatcctttccagcacctgttgtttcctgactttttaatgatcgccattctaactggtgtgagatggtatctcattgtggttttgatttgcatttctctgatggccagtgatgatgagcattttttcatgtgtctgttggctgcataaatgtctttttttgagaagtatctgttaatatcctctgcccactttttgatggggttgtttgtttttttcttgtaaatttgtttgagttctttgtagattctgggtatttgccctttgtcagatgagtagatggaaaaaattttctcccattctgtaggttgcctgttcactctgatggtagtttcttttgctgtgtagaagctctttagtttaattagatcccatttgtcaattttggcttttgttgccattgcttttggtgttttagacatgaagtccttgccggtgcctatgtcatgaatggtattgcctaggttttcttctagggttttatggttttaggtctaacatttaagtcttgaatccatcttgaattaatttttctataaggtgtaaggaagggatccagtttcagctttctacatatggctaaccagttttcacagcaccatttgttaaatagggaatcttttcccaatttcttgtttttgtcaggtttgtcaaagatcagatggttgtagatacgcagcattatttctgagggctctgttctgttccattgatctatatctctgttttggtaccagtatcatgctgttttggttactgtagccttgtagtatagtttgaagtcaggtagcgtgatacctccagctttgttcttttggcttaggattgtcttggcaatgcaggctcttttttggttccatatgaactttaaagtagttttctccaattctgtggagaaagtcattgatagcttgatggggatggcattgaatctatgaattaccttgggcagtatggccattttcacgatattgattcttcctacccatgagcatggaatgttcttccatttctttgtatcctcttttatttcattgagcagtggtttgtagttctccttgaagaggtccttcacgtcccttgtaagttggattcctaggtattttattctcttagaagcagttgtgaatgggagttcactcatgatttggcttctgtttgtgtgttattggtgtataagaatgcttgtgatttttgcacattgattttgtatcctgagactttgctgaagttgcttatcagcttaaggagattttgggctgagacaatggggttttctagatatacaatcatgtcatcggcaaacagggacaatttgacttcctcttttcctaattgaataccctttatttctttctgctgcctgattgtcctagccagaacttccaacactatgttgaataggaatggtgagagagggcatccctgtcttgtgccagttttcaaagggagtgcttccagtttttgcctattcagtatgatattggctgtgggtttgtcataaatagctcttattattttgagatacgtcccatcaatacctaatttattgagagtttttagcatgaagggctgttgaattttgtcaaaggccttttctgcatctattgagataatcatgtggtttttgtctttggttctgtttgtatgctcaattacatttattgatttgcatatgtggaaccagtcttgcatcccagggatgaagcccacttgatcatggtggataagctttttgatgtgctgctggattcagtttgccagtattgtattgaggttttttgcatcgatattcatcagggatattggtgtaaaattctctttttttgttgtgtctctgccaggctttggtatcaggatgatgctggcctcataaaatgagttagggaggattccctctttttctagtgattggaatggtttcagaaggaatggtaccagctcctccttgtacctctggtagaattcagctgtgaaatccatctagtcctggactttttttggctggtaagctattaattattgcctcaatttcagaacctgttattggtctattaagagattcaacttcctcctagtttagtcttgggagggtgtatgtgtcgaggaatttatccatttcttctagattttctagtttatttgcatagaggtatttatagtattctctgatggtagtttgtatttctgtgggatcggtggtgatctcccctttatcattttttattgcatctatttgatttttctctcttttcttctttattagtcttgccagcagtctatcaattttgttgatcttttcaaaaaaccagctcctggattcattgattttttgaagggtttcccatgtctctatctccttcagttcttctctgatcttggttatttcttgccttctgctagcttttgaatgtgtttgctcttccttctctagttcttttaattgtgatgttagggtgtcaattttagatctttcctgctttctcttgtgggaatttggtgctataaatttccctctacacactactttaaatgtgtcccagagattctggtatgttgtgtctttgttctcattggtttcaaggaacatctttatttctgccttcatttcattatgtacccagtagtcattcaggagcaggttgttcagtttccatgtagtagagtggttttgagtgagtttcttaatcctgagttccagtttgattgcactgtggtctgagagacagtttgttataatttctgttcttttacatttgctgaggagtgttttacttccaactcagtggtcaattttggaataggtgtggtgtggtgctgagaagaatgtatattctgttgatttggggtggagagttctgtataagtctattaggtccacttggtacagagctgagttcaattcctggatatcctttgtgtcttgttgatctgtctaatgttgacagtggggtgttaaagtctcccttgattattgtgtgggagtctaagtctctttgtaggtctctaagtaatcactttatgaatctggttgttcctgtattggtgcatatatatttaggatagttagttcttcttgttgaactgatccctttaccattatgtaatggccttctttgtctcttttgatctttgttggtttaaagtctgttttatcagagactagcattgcaatccctgcctcttttggttttccatttgcttggtagatcttcctccatccctttgttttgagcctatatgtgtctctgcacatgagatgggtttcctgaatacagcacactgatgggtcttgactctttatccaatttgccagtctgtgtcttttaattggagcatttaggttaatatttacgtttaaggttaatattgttatatgtgaatttgatcctgtcattgtgatgttagctggttcttttgctcgttggttgatgcagtttcttcctagcctcgatggtctttacaatttggcatgtttttgcagtggctggtaccggttgttcctttccatgtttagtgcttccttcaggagctcctgtagtgcaggcctggtggtgacaaaatctctcagcatttgcttgtttttaaagtattttatttctccttcacttatgaagcttagtttggctggatatgaaattctgggttgaaaattcttttctttaagaatgatgaatattggcccccactctcttctggcttgtagagtttctgccaagaaatccactgttagtctgatggcttccctttgtgggtaacccgacctttctctctggctgcccttaacattgtatccttcatttcaactttggcgaatctgataattatgtgtcttggagttgctcttctcgaggagtatctttgtggcgttctctgtatttcctgaatgtgaatgttggcctgtcttgctaggttgggtaagttctcctggggaatatcctgcagagtgttttccaacttggttccattctccctgtcactttcaggtacaccaatcagatgtagatttggtcttttcacatagtcccatatttcttggaggctttgttcgtttctttttactctttttttctctaaacttctcttctcgcttcatttcattcatttgatcttcaatcactgatacccttttttccagttgatcgaatcagctactgaagcttgtgcattcgtcatatagttctcgtgccatggttttcagctccatcaggtcatttaaggccgtctctacattgattattctagttagccattcgtctaatcttttttcaaggtttttaacttctttgcgatgggttcaaacttcctcctttagcttggagaaatttggtcatctgaagccttctctcaactcatcaaagtcattctccgtccaggtttgttctgttgctggtgaggagctgtgttcctttggaggagaagaggggctctgatttttagaatgtttcagtttttctgctctgttttttccccatctttgtggttttatctacctttggtctttgatgatggtgacatacagatgggattttggtgtggatgtcctttctgtttgttagttttccttctaacagtcaggaccctcagctgcaggtctgttggagtttgctggaggtccactctagaccctgtttgcctgggtgtcggcagcagaggctcagaacagcgaatattgctgaacagcaaatgttgctgcctactcattcttctggaagtttcgtctcagaggggtacctagccatgtgaggtatcagtctgcccctactggtgggtgtctcccagttaggctactcgggggtcagggagccacttgaggaggcagtctgtccgttctcagatctccagctgtgtgctgggagaaccactactctcttcaaagctgtcagacagggacatttaagtctgcagaggtttctgctgccttttgttcggctatgccctgcccccagaggtggagtctacagaggcatgcaggcctccttgagttgcggtaggctccacccagttcgagcttcccagctgctttgtttacctactcaagcctcagcaatggcgggtgcccctcccccagcctcactgctgccttgcagttcgatttcagactgctctgctagcagtgagcgatgctccatgggcgtgggaccctccgagccaggtgtgggatataatctcctggtgtgccgtttgctaagaccattggaaaagtgcagtattagggtgggagtgacccaattttccaggtgccatctgtcacagctttgcttggctaggaaagggaatttcctgaccctttgcacttcccgggtgaggcgatgcctctccctgctttggctcacacttggtgcactgcacccactgtcctgtacccactgtccaacaagccccagtgagatgaacccggtacctcagtcggaaatgcagaaatcactcatcttctgcgtcactcacgctgggagctgtagactggagctgttcctattcggccatcttatgaatcatgcatgttcaactatgagcaactatgtgtattcaatgggaaatggaataccataaaattgtcatatgttgagcccaaaatgataggatagaatttgatagtctgaggatggaaaggaccttcaaggccacttttaaaaaccccattcccatatgatgcttgaattcttaaccactgtgtgtctagtattttctcatttccagtgatatgtgtgcctgccaacctttccgtctccaagagctttaactatcaaaatgtatgtgtgtgtgtttttgtgtgtgcatgtgtgtgtgagtgtgcgtgtgtgtgtgtgtgtgtttagagagagagagagagacagaaagagaaggagagactaaaatccaattcactgttctttctgggacccaaagaacaagtctagtcattctccatttctagtctctttccctagcaatcggctagacatgctagacatagacacatgtacatcactcctttgaattacaacattcagtatttgtctatcacttatatgataaaatacaaacttagcttttatttttatttttttagagacagtgttttactatgtcacccaggctagagcatcagtggcacaatcatagcccactgcagcctggaacccctgggctcaaggaatccttccacctctgcctcctgagtagcagagactacagatgtgcaccaccagacccagctaatttggttttttactattttttgtggagatggtgtattgtcttgtggtgttgctcaggctgatcttgagctcctggcctcaagcactcctcccatctcagcctcccaaaatgctgggattacaggcatgaaccaccttacccagccaaatttcttaatatgatatacatgctcctttaaaatcaagcaccatctttgctttcaacctcattattaaccactttcccatatatgcaacatatgtttcagccatactagtgtctagtttttccctgaacactccttggtgcttttgtttatgccctttctgcccacctttgcctggtgaaatcctcatcaatcttcaaattctatcaaatactatcttccatataaagcattttctaaacccacctatgtaaaaagattagtgttttcctattttgttgatgcctccattgcagcattttccagtccaacgttttctagaattgattgtggccaggctaccagactgggccagggcctgtgtcttttctgtcacccagaagcaaaggtctaacaatggatatctgctgaatgaatgaacgaaaatgaatcattaatatattagtaaatacgttaattaaagttccaggtatgaatactgaaggctgcattcaggcagagctggatccaaggatatgctaggttggtctagcacaagaatcagagttttcctctgcaagctatgaaaaatttgggtttagcaggtatttgggatgatgaattatacatttaaccagtgttgaatgagcacttgtccttaaggagtttagagtctgtgaccagggagaatggtgattttcttagctagggcagtttttctaaaaaggtagttgcattgtgtgtttttgaccactgatgataaattcaagtctctcttccttcccaatagcccggaagctgaagaaacttggtaatctgaaactacaggaggaaggagaggcttccagcaccaccagccccactgaggagacaacccagaagctgacagtgtcacacattgaaggctatgaatgtcagcccatctttctgaatgtcctggaagccattgagccaggtgtagtgtgtgctggacacgacaacaaccagcccgactcctttgcagccttgctctctagcctcaatgaactgggagagagacagcttgtacacgtggtcaagtgggccaaggccttgcctggtaaggaaaagggaagtgggagcatgagataagggggatcatatttagtgaacgctcctatggaccagccaccatgtctggtgcttttctgcccattaactcaggcagtcttcatcataaccctgtgggagagggattgttacaagtctcaatttaaacatacagggatcgaaactcagaaagcaaagagaaagatagtattatcgggtgtcttatgtggcccacattgatgcacagcagtcatgctttcatattcaactcacaaaaatggtcagcaaattttccattaatcacaaatcacatagacatacccatatatgccttaggatgctcttctatatttgcacacacaggctcaccccaaagataatctctagtttgactgacattctgtcttcaatgtcatctttaggagctatatcatgggaactctcataatatggtatggtggaaagaacatgaggttgggaatcagaacacttcgggtctgctcttagctctgctagtaacttattgtgtgatcccttccccttctgggtctcaatttctctatctgtataatgtataaagcgtggtttgtatcaaattgatggtttccagtttttgaaaaaaggaacgctttttgcaccttaaactacctaaggaatcataatgagaggaaagattaggtaatagtgaaagaattaccaagtgttggtctaacagaagttggataacagaagttcctcagtgatggggaactcacttctttcttatgtcatctgttgtttaaacaagtctggttattaaaatattacagcttaaggaattcttagagatcctctatccaatgattcacaaactttcctttagcagccaagtgctttatttctcaaaagaattgtacacagatacaagtggagctagtttatttaaagccagagcctgtagcttgggcctcaccagttcagcctctttctctctatcccagggaagccctaggtcactcttgcaaaatcttagggctccaaggaacacagtttgaaaaccagtgaagtatatgccctttaaaggttctcctaatcctgcaattatgattcaaagattcttttgaaataacaacaaccaaaccttctcttgtggagtcaaagattaacctgcctttcaataataactgccattcaggtagaaatttatagtgaacagagcaattttgtatgtattacctgaattgattcttataggaatcctataacatgagattctttctcttattttacagaccaaatagggaagctgtgagaatgatgtgattggcctatagttacatagtcagaaaatagcaggaccagaacttgagcccaggttctctcctgattccaaattctctctattccactccacctgtaggctgtagcaccactgcagttctgtagctctgggctttacagtgaggggccaaggcttcattgaaggccacttgggtcatagtatgggcttgttgcatttgaagacatttcatgttggctgtcaagtcttagatttgtatttccaactcacagggcctggtcacagccctaaccatctcttataccttctcagcttgggaagctgaggtcgactagccaataagaacactgggaaggaaacccaaggactctgactggatatgctctgtgccaaaacagagggttcactcagagaggaaaaatataaaaaagaaaaaggagaaggttgctttaattcttatcactttttcatctggatattttgatatcatgtgtttgacagagattcaaagtttaatcttcccaagcagtttccaaacacttatctcattttataggctacagagctttttcatatatatgatcccacttaatctttacaacaattctatgaatcatagagactattatttccatttcacatgccaaggctcaaagaggttaactaacttgctccatttggtcacttaacacatggaaccagaacttgacctagaccttcgggtttctaaattggttatcttgacaataacctagtgcaaaacactatagcagaatttgtatgacttgggatcactggggctttccttggcccaaccaccaagatggaaagccccctccccttacattaacaaatctgcaagccaatatcagttcaccatctagcttgccagactaaatgatttctgaccccaagtcttttaaaagaatagcttcaaaagaaagccaattaccacattcacaagaactgttcttcatattatctataattacctacaagtacaagtaatttgctaattcaatagattgagttcttgacctgtaagatgaactgtgctaggcccctaataagataaattttgttttaagttttctgtgacagtaaagatgtatgaaaattgcctagtagagtacctggcacattaataaatgataactgttaatttggagtgggtgagtagactgggtgtgcacagtatatttagaatcaaatttatctggtttggaatcctagctatggactagttctgtgaccttgagcaaatcacatgtcttctctgtgcttctgtgtcctcatttgtaagatgatagaataatcactacctttcaaattgttgtcaacaaaaagattatgtataaagagcacctagtaacgtagcctgaaacatagtcaatgctctgtaaatggtggtttattattatgagacttgaatgctaagccactgctttcacgaaactcaattttagctaccacttgccttgcctagaagctcatgcatggaccccaaggtgaaattgtgttctctgaagacctcggctggcagatgtactacagcagcaaagatttccaaactggcctttctttgagcccattctcccagactagacaggagactacaagtttctgctgcacatgaaaaaaatatgatgtcaatcggattctagtgagaaaacagagtctcaaagaaactgcttctgctccctagcgtgtttaatgtgtttcagaacctgagaatgactcctctctgtttctccagaacagcctaacacagtggcaaatgggtgttgagtgaatgcatacttaaggaaatctgtagggttgcagctactctttcctcaagtaatcccttgatagtcatgtaggctacttcagagattgggcattagagaacagagtcaggtattataatcagattagactctagggaggttagccagccatattgctgatatgtgcacagttactgggtttgagtgctaagcagctctcattaaggacggttaattaatattatggccaaattaagctttcccttttctctcctctttgttagttcggtggcattttagggagaaaaaaataagcatcagtatggacaatttgcttgatacctgtacaatttaattctcatccttccatgtgccttcacattcacacattccaccagaagaccaaggttcaccagccaaaagcttttcttgctccccactgcctcctacccaagatattcagggtcaacctcccaggcctcttctctaagagatccttggttgctacatgcttagaccctgcttcttatttcctgctgagaagggtcagtccaaggcattctgtgctacagaagggttccaagcaggaactactctgggatctgaggctccagccggtctgtcagcgtgtcattacagtgaaggtgggaagcacaggcctgggagctaagactgctaagatgagggactctagaatccctgatacctggaaggcctaggatctaaaagaaaagaacagggaaatggggctatatgagtggacagggaccaaccaagcagaacaatgtgtctggataatgtagacttcagacctgatcctatggctgacaaaagctggtgaccttggtagttcctgagctgtaaccttcattagtggagtagaaaaaacactggagaagagaatcagaacacctgggttctagtattagttcagccacatataaaccatatgaccttgggtaagtcagtttatttctctggccctcatgttccttgttggtaaaataagtgccacatcacctaacctctgggattattgtgagagttaaattaggtcatcaacaggaaagtgagaagtttgatctaaatttggggaagcattcctaatgaggtatgatgacaaaatttcagataattctggatttgttggtgagaagagagagtgttggtagggacgagctctgaggtgatgcctttataactttaagcatccaactgtttcaaaaactccaggagaacatggccatgtctgttctacctgtgtattattgtagacgtagcttctgggagcctctgctctctgagcttaagggaggtaatttggagatcatttaattctcattttacaaaaggaaaaaaaattgagggtctttaggccatttgtttaggtaatatttcttaagtgcccactcaaatacgtggactgtactaagtactagggaggtaaagataaataagaagatatggtccctgtcttcaagaagctccaagtcttgtgggggagacagacatgtatatacatagacttcaatgctgtgtaatgactgctataattgggtgaggctacacaaggtgcaatgagaatgtaaaagaagaatctttaagccttcttcttggatgagttgggaaagccttcacagaagaggtagcctttgagtgaagacttgaaagatgagtagtgtttaccggatgaaaggcctgagaaggaggaatgcattctaggcaaaagtaactgcctgtgcagagataacagagatatagaggcatgtgagagcgcaagtggcaagagatcagtctaggtaggcaggtcataaagggcctattcatgtataatgatggcagtaagatgaggatggcagtagggtgggaaattagtagggccagggtacctattgagtagaaaagaatggagaggaaatgccaggcagaaagaggatggacgcaagagagggaacatgaaagtggtgaacaggtggcagtggctgtcaagacatctctccataccctgtacactgtatgtaatatccatctcccagggttgttagaagggtcaaaccagatcgtagctggaaaacagctttgtgaagtgaaaactgctgtttatgtgggggaaatgattgttaaactgcatctttggaaaggtgaagtgatcaagagcacagaccttggaatctgactgctttgctttgtaacttggtctgccaattactagctgtatgatcttggacaagttccttaacctctctctgactcacttgtactggttcacagaatggagataataatagtacttaccttactcattgttgtgaatgttaaatgagataatataagtaaagtgcttagaaaagagttaaatgtaccccataaatacatacaactatcatgtacccaaaattatttttaatttttttaaaaaagagcaatccaatagcaaaagaaaaaaagagttcactcatataagcagtcaataagtgttagattatttttctcttacaactgacaatgccctttttgtctccatcatcatctcatttgagcagctcagggaagtagggaggataaggaatattatcctcaccatatagtttgtgcttttccccaccaccccttaatggccagcctggatggtccctggggatccttaggggatgcccgaataccagagcatctctgcccaacagggactcagacttagctcaacccgtcagtacccagactgaccactgcctctgcctcttcttctccaggcttccgcaacttacacgtggacgaccagatggctgtcattcagtactcctggatggggctcatggtgtttgccatgggctggcgatccttcaccaatgtcaactccaggatgctctacttcgcccctgatctggttttcaatgagtaagtgctcctggggcccagacctcactaaaatacagcagcttggccagacctggttggtggtgatggtgatggggtgacagtgaagcttagctcatttgatctgcagttgtcgcagcggatgccccagccagccaatccagtatgaggcggctttgccctggctttcagccaactggcaggagcccaggaggatggtgctgagaccacccctttcacacccaagaaccaatcctagtcatatttctggtctgctttgcagcttatctcaaaaccacatggaaagattcctccccttcacatataaaagaggcagaaagactctggctttaagggctggagtttcttgggttcttttgctaccaccaaaggctacttctagtcaccatttgctgagcaactagtttgtgccaagactatgctagatactttctaaatcctagctcattgagtcctcatggtgacctgacctcacctttttatagataacactatttttttatggatggggaaaatcaggctcagcaaaataaagtgactcacccaaagtcacagagctagtgcctgttggagacaagattcaaacgtatgtccctgtcgatctcagctcttctgcgtcatggtggtaactgatgggaaggagtacctctaccgctctctggctgtgtgaccttggtactgccattttccttcccttaaacagctttaattaatacctgccctgccaccagctccatataacatcatgaatttggccagtggctcagattttggaattacatttttctccactaaaatctcagttctactattttcttagtcagcatctttgggaaagacctttaacttttccgaccctcaatttcttcatccattaatgataacagaaccttcataagtaatttcttatgataactaaatgggaattgacagatgtggaatgtctggcccatagtaggcaagaaggaaaaaaaaagtccctttctgattcaccctttccctaatagtgatacattttttttccccgagatggggttttgctctgccacccaggctggagggcagtggcgcaatgatctcagcccagtgcaacctccacctccctggttcaagcaattctcctgcctcagcttcccgagtagctgggattatagatgcccgccaccgtgtccatctaatttttgtatttttggtagagacgggatttcaccatgttagccaggctggtctcaaactcctgacctcatgatctgcccgcctcagccgggcatgataatcttttctatgtctgctgtatgaggtccctcgatggcattgtgaatggagctggccagagaaatcttcccaaggaccttgagctagtctcaccacagagaatccttccagtcaggacaggaattgaccttcccccctcttcagccctctaacccagaagagtcttaaaataaaatctacaggccaatggttccttccagtacagcactgcaatgcgagggagagtgagcgtccccagctgccctctcccaaccctgccagcctggtagccaaaagctaagaataaccactaggcttttggcacaaactgctttgtggttttcagatctccgcaaagttgcctatgatgccatcttctggggcaggccttgaaaagccccctaactgttcatctcccatccttaaacccctgctgcccttaagcagttgaatcaactccatgagcacctgctctaccttccccagagccctgagacctttggagctttgaaaagtgataattggttgttctctaaatcctcatttccttctctgcctctaagtaagcatgtggcatcccacctcggcttcctggtccagtcttgttcatcttataaaaaggcctccctacggggtcagaggcctagacccatcaaacccagggctcctgaaacaataggacccctattcctcctgtaggaagccactgtgttagagctctcagggtgtctacaaacatctagataagtgtttctcaacatggattctgttgacatattgggaaaaataattttgtcattatgtagaatatggttaacatacctggcaccagcctactctataccaaataggattccagtcattctgacagcccaaactgctcccacacatttctgacacccactgaagaggcagtactctccagttgagtgcaactaatccctgccagccttcctaaggtgctaatggggagcctcagacccaaagagagagagaagaacttgtccaatgtaggtcaacccatttgctgatctcttcaacaccaagctctattatcagccctgtttttttctttctttctctctttgtagagatcacatgttgtgaggataatgagcttgaaccttagctgtgtgaccttgggcaaattactgaacttctatgtgccgcaaattttatctggagactgctgaagagtattataatagcacctttctatatgtcatttattgaacacctgctatgtgtcaggcactgtgctcagtgttttccaatcttcatttctcctcttattttctctcttgcactcccaccaaccttgttctcttcctaaattccattcctgcctcatttttctaccctccattctcctctctcttccttcctttaactgtctccctagtatttttccccttttccccctttcttttccccttcccccatgaatttcttctctttcctttccccttctctttcctccattccccactttttctgcccctgaggcctgcagcaatgttaaaggaatcctcattccagcattgtgatttcaatggtaaaaagattgcagcattgtcatcaacagaggtgggaaagtacattggagactggagcagagccagacctcagggtcagccaatcttactaaaaaattctctacagtgaaagagcttggagcaacactgttctgctcaattgatttgtgataccatctaaacacttcctctttctagttgggcttcagcctgagttgaataattctacaccatctgccctcttctctctttctccaggacagccaagatctctctgagataggatgctgagcttccacccagacaataccaggcctgctcatcctatggagtaggctagtggcttggaaaccaaaatgtcaaaccatagcctttaggctccatctgggaggtctttgtcctcaccacttaagtgggtgtcaaatttccttccctttctgcacacgctgcacaatcaatttctgtcttacacacacacacacacacacacacacacacgatttttgaagtgctgaaaactggaaggcctactagcatgaggatgctgtgtcttctcttagaggtatgccatggtcagccatggaaccgagaggttgctcttccttgaaaagctggccaagcattggccacttccccatataatttataggtgataatgtggtgatctgttcagaagtgactataataaatgcaactcacatatgtctacagtttccaaactgtggtaaggagcagccagcatatgagggaatgggctccccttcagcaggggacatttaaactagacattcaaaaacactccctggcagatttaacattggaactcgttttgaaagaacaatgtggaatctccttcactgggagtttttgaataagtatgaaatttctagtattccaggccagaggcaaaggggtcaacaggatgaccaaacacttcgggtcatttgcaaatcttgatgtcctgatgttaagagctgactactggggcttctcctaaaaatccttcatgttgagctgcctggaaggcaggttctcattctggctgtagctgagatgttagaactgtagtcagggagaccatgtgcctcccccattgtgttcatttggttaggctttcctgtccctgactcagaaaacagaaggggcacagagacctggaaattccatgtgctaacccatatcctggccagagaagatgagtagttatcagggtgtcaggattttggaaaacagagagagaaaaaaaacaaacaaacagacaaacaaacaaaaaaaccttttcctggtccctggagcaccagcaggagaaacagcaagctcttcttggaaaacctggcgagggatggcaatcagagacattccctctgggcttattgtaaacttcccctcattcctttttcctctgtgtatctccttcccaggtaccgcatgcacaagtcccggatgtacagccagtgtgtccgaatgaggcacctctctcaagagtttggatggctccaaatcaccccccaggaattcctgtgcatgaaagcactgctactcttcagcattagtaagtgcctagaagtgcagggaatgccccctgagggcacagagattcagagaggaccacttttgccattaaaacattattagggaaaagccagctcctggacatttcccttcttcattccccctccccatccccactctactctctctcagcatcattttcctaacaagaaacaatttcatgactagaagccaatttatttgctagaagtcaacctccatcagattccccacctatccccagtctgtctttgggacaaggcctttttgactggttacagcaggtctctgaatttttccatagcttctgctatagaaacagacatgggccaccttgtattctttgcagggcagtagagcaggaggcatttcctcctggaaagatttcctcttctgccaacaggaggagatctatgtaagcaactcagataggatttgtatggcagccaaggaacttttctttaatatcttttctaagagccctctcttagcccctacggagggagaagggcaaaatttgatattcaaagctatgtgttttggttatctaaatcagggttttactgtgaatgacataaaagcttaggtcctaaaaaatgagtatctgagaagagtagaaaaagaaaaggttcaggaaatttgatttacttgactcctttcagatcggatccagctatcctttcccctgagatctccctgacagactgaaggccccaagcacacagacttcaactaacaggaagccaagtagatggttccctgtgggggtgggggtcaagtctgtggtcagaaaacttggtgctttgtctaatgctccttcgtgggcatgcttcccctccccattctgtcttcatcccacatcagttccagtggatgggctgaaaaatcaaaaattctttgatgaacttcgaatgaactacatcaaggaactcgatcgtatcattgcatgcaaaagaaaaaatcccacatcctgctcaagacgcttctaccagctcaccaagctcctggactccgtgcagcctgtaagcaaacgatggagggtgctttatcagggagaacagcctgatagagccaatgataatatgcttctctagagtctggcaccacctgttgggaggtgcttccattcccctctggctttgagtgtggtccaggaagaaaatgtggtgaagaaaagaacacgggtcacagtgtcccagctggatattgtgaaaggggtggaggagttgagaacagagcagttgggactcagggaagggacttgcagcagatgaattctctaggcagacaaaacagacctggatgtttttcccctcttctttgagtcatgttcatgtgagtttgtctgtctgtgtgtgtgtgtgtgtgtgtgtgtgtgtgtgtgtgtgtgtcagagagagagagagagagagagagatggagtgcggaggcttgggtgagagcacaagctggagaagtcttgagtcagagagcttacaatggtataagacatctcttgggagccctcagtgactccatggagaccatttctttctctctctctcgctgtctctctctaacacacacacacacacacacgacctcatgggggaggaccaaggaagtacggggaagggggaggaaacaaaaggctgaaagaccaaaaatcagaggttggggaagaggctagcagaggccacctccttgtcaaccctgtttttctccctcttattgttccctacagattgcgagagagctgcatcagttcacttttgacctgctaatcaagtcacacatggtgagcgtggactttccggaaatgatggcagagatcatctctgtgcaagtgcccaagatcctttctgggaaagtcaagcccatctatttccacacccagtgaagcattggaaaccctatttccccaccccagctcatgccccctttcagatgtcttctgcctgttataactctgcactactcctctgcagtgccttggggaatttcctctattgatgtacagtctgtcatgaacatgttcctgaattctatttgctgggctttttttttctctttctctcctttctttttcttcttccctccctatctaaccctcccatggcaccttcagactttgcttcccattgtggctcctatctgtgttttgaatggtgttgtatgcctttaaatctgtgatgatcctcatatggcccagtgtcaagttgtgcttgtttacagcactactctgtgccagccacacaaacgtttacttatcttatgccacgggaagtttagagagctaagattatctggggaaatcaaaacaaaaacaagcaaacaaaaaaaaaaagcaaaaacaaaacaaaaaataagccaaaaaaccttgctagtgttttttcctcaaaaataaataaataaataaataaatacgtacatacatacacacatacatacaaacatatagaaatccccaaagaggccaatagtgacgagaaggtgaaaattgcaggcccatggggagttactgattttttcatctcctccctccacgggagactttattttctgccaatggctattgccattagagggcagagtgaccccagagctgagttgggcaggggggtggacagagaggagaggacaaggagggcaatggagcatcagtacctgcccacagccttggtccctgggggctagactgctcaactgtggagcaattcattatactgaaaatgtgcttgttgttgaaaatttgtctgcatgttaatgcctcacccccaaacccttttctctctcactctctgcctccaacttcagattgactttcaatagtttttctaagacctttgaactgaatgttctcttcagccaaaacttggcgacttccacagaaaagtctgaccactgagaagaaggagagcagagatttaaccctttgtaaggccccatttggatccaggtctgctttctcatgtgtgagtcagggaggagctggagccagaggagaagaaaatgatagcttggctgttctcctgcttaggacactgactgaatagttaaactctcactgccactaccttttccccacctttaaaagacctgaatgaagttttctgccaaactccgtgaagccacaagcaccttatgtcctcccttcagtgttttgtgggcctgaatttcatcacactgcatttcagccatggtcatcaagcctgtttgcttcttttgggcatgttcacagattctctgttaagagcccccaccaccaagaaggttagcaggccaacagctctgacatctatctgtagatgccagtagtcacaaagatttcttaccaactctcagatcgctggagcccttagacaaactggaaagaaggcatcaaagggatcaggcaagctgggcgtcttgcccttgtcccccagagatgataccctcccagcaagtggagaagttctcacttccttctttagagcagctaaaggggctacccagatcagggttgaagagaaaactcaattaccagggtgggaagaatgaaggcactagaaccagaaaccctgcaaatgctcttcttgtcacccagcatatccacctgcagaagtcatgagaagagagaaggaacaaagaggagactctgactactgaattaaaatcttcagcggcaaagcctaaagccagatggacaccatctggtgagtttactcatcatcctcctctgctgctgattctgggctctgacattgcccatactcactcagattccccacctttgttgctgcctcttagtcagagggaggccaaaccattgagactttctacagaaccatggcttctttcggaaaggtctggttggtgtggctccaatactttgccacccatgaactcagggtgtgccctgggacactggttttatatagtcttttggcacacctgtgttctgttgacttcgttcttcaagcccaagtgcaagggaaaatgtccacctactttctcatcttggcctctgcctccttacttagctcttaatctcatctgttgaactcaagaaatcaagggccagtcatcaagctgcccattttaattgattcactctgtttgttgagaggatagtttctgagtgacatgatatgatccacaagggtttccttccctgatttctgcattgatattaatagccaaacgaacttcaaaacagctttaaataacaagggagaggggaacctaagatgagtaatatgccaatccaagactgctggagaaaactaaagctgacaggttccctttttggggtgggatagacatgttctggttttctttattattacacaatctggctcatgtacaggatcacttttagctgttttaaacagaaaaaaatatccaccactcttttcagttacactaggttacattttaataggtcctttacatctgttttggaatgattttcatcttttgtgatacacagattgaattatatcattttcatatctctccttgtaaatactagaagctctcctttacatttctctatcaaatttttcatctttatgggtttcccaattgtgactcttgtcttcatgaatatatgtttttcatttgcaaaagccaaaaatcagtgaaacagcagtgtaattaaaagcaacaactggattactccaaatttccaaatgacaaaactagggaaaaatagcctacacaagcctttaggcctactctttctgtgcttgggtttgagtgaacaaaggagattttagcttggctctgttctcccatggatgaaaggaggaggattttttttttcttttggccattgatgttctagccaatgtaattgacagaagtctcattttgcatgcgctctgctctacaaacagagttggtatggttggtatactgtactcacctgtgagggactggccactcagacccacttagctggtgagctagaagatgaggatcactcactggaaaagtcacaaggaccatctccaaacaagttggcagtgctcgatgtggacgaagagtgaggaagagaaaaagaaggagcaccagggagaaggctccgtctgtgctgggcagcagacagctgccaggatcacgaactctgtagtcaaagaaaagagtcgtgtggcagtttcagctctcgttcattgggcagctcgcctaggcccagcctctgagctgacatgggagttgttggattctttgtttcatagctttttctatgccataggcaatattgttgttcttggaaagtttattatttttttaactcccttactctgagaaagggatattttgaaggactgtcatatatctttgaaaaaagaaaatctgtaatacatatatttttatgtatgttcactggcactaaaaaatatagagagcttcattctgtcctttgggtagttgctgaggtaattgtccaggttgaaaaataatgtgctgatgctagagtccctctctgtccatactctacttctaaatacatataggcatacatagcaagttttatttgacttgtactttaagagaaaatatgtccaccatccacatgatgcacaaatgagctaacattgagcttcaagtagcttctaagtgtttgtttcattaggcacagcacagatgtggcctttccccccttctctcccttgatatctggcagggcataaaggcccaggccacttcctctgccccttcccagccctgcaccaaagctgcatttcaggagactctctccagacagcccagtaactacccgagcatggcccctgcatagccctggaaaaataagaggctgactgtctacgaattatcttgtgccagttgcccaggtgagagggcactgggccaagggagtggttttcatgtttgacccactacaaggggtcatgggaatcaggaatgccaaagcaccagatcaaatccaaaacttaaagtcaaaataagccattcagcatgttcagtttcttggaaaaggaagtttctacccctgatgcctttgtaggcagatctgttctcaccattaatctttttgaaaatcttttaaagcagtttttaaaaagagagatgaaagcatcacattatataaccaaagattacattgtacctgctaagataccaaaattcataagggcagggggggagcaagcattagtgcctctttgataagctgtccaaagacagactaaaggactctgctggtgactgacttataagagctttgtgggtttttttttccctaataatatacatgtttagaagaattgaaaataatttcgggaaaatgggattatgggtccttcactaagtgattttataagcagaactggctttccttttctctagtagttgctgagcaaattgttgaagctccatcattgcatggttggaaatggagctgttcttagccactgtgtttgctagtgcccatgttagcttatctgaagatgtgaaacccttgctgataagggagcatttaaagtactagattttgcactagagggacagcaggcagaaatccttatttctgcccactttggatggcacaaaaagttatctgcagttgaaggcagaaagttgaaatacattgtaaatgaatatttgtatccatgtttcaaaattgaaatatatatatatatatatatatatatatatatatatatatagtgtgtgtgtgtgttctgatagctttaactttctctgcatctttatatttggttccagatcacacctgatgccatgtacttgtgagagaggatgcagttttgttttggaagctctctcagaacaaacaagacacctggattgatcagttaactaaaagttttctcccctattgggtttgacccacaggtcctgtgaaggagcagagggataaaaagagtagaggacatgatacattgtactttactagttcaagacagatgaatgtggaaagcataaaaactcaatggaactgactgagatttaccacagggaaggcccaaacttggggccaaaagcctacccaagtgattgaccagtggccccctaatgggacctgagctgttggaagaagagaactgttccttggtcttcaccatccttgtgagagaagggcagtttcctgcattggaacctggagcaagcgctctatctttcacacaaattccctcacctgagattgaggtgctcttgttactgggtgtctgtgtgctgtaattctggttttggatatgttctgtaaagattttgacaaatgaaaatgtgtttttctctgttaaaacttgtcagagtactagaagttgtatctctgtaggtgcaggtccatttctgcccacaggtagggtgtttttctttgattaagagattgacacttctgttgcctaggacctcccaactcaaccatttctaggtgaaggcagaaaaatccacattagttactcctcttcagacatttcagctgagataacaaatcttttggaattttttcacccatagaaagagtggtagatatttgaatttagcaggtggagtttcatagtaaaaacagcttttgactcagctttgatttatcctcatttgatttggccagaaagtaggtaatatgcattgattggcttctgattccaattcagtatagcaaggtgctaggttttttcctttccccacctgtctcttagcctggggaattaaatgagaagccttagaatgggtggcccttgtgacctgaaacacttcccacataagctacttaacaagattgtcatggagctgcagattccattgcccaccaaagactagaacacacacatatccatacaccaaaggaaagacaattctgaaatgctgtttctctggtggttccctctctggctgctgcctcacagtatgggaacctgtactctgcagaggtgacaggccagatttgcattatctcacaaccttagcccttggtgctaactgtcctacagtgaagtgcctggggggttgtcctatcccataagccacttggatgctgacagcagccaccatcagaatgacccacgcaaaaaaaagaaaaaaaaaattaaaaagtcccctcacaacccagtgacacctttctgctttcctctagactggaacattgattagggagtgcctcagacatgacattcttgtgctgtccttggaattaatctggcagcaggagggagcagactatgtaaacagagataaaaattaattttcaatattgaaggaaaaaagaaataagaagagagagagaaagaaagcatcacacaaagattttcttaaaagaaacaattttgcttgaaatctctttagatggggctcatttctcacggtggcacttggcctccactgggcagcaggaccagctccaagcgctagtgttctgttctctttttgtaatcttggaatcttttgttgctctaaatacaattaaaaatggcagaaacttgtttgttggactacatgtgtgactttgggtctgtctctgcctctgctttcagaaatgtcatccattgtgtaaaatattggcttactggtctgccagctaaaacttggccacatcccctgttatggctgcaggatcgagttattgttaacaaagagacccaagaaaagctgctaatgtcctcttatcattgttgttaatttgttaaaacataaagaaatctaaaatttcagatgaatgtcatcagagttcttttaattagctctttttattggctgtttttattgaagtcaagagttggtatcatgcccggttgcgttttatgctattttgattttcatatatttttaaaagtctttgcacaagggttacaaatttgccctgtggtggccttagcataagctgacctgggaccaccaaaataacaaggaatttgggctagaaagcacagatggacactggtgacccatcacaacttctcttgaaaaaccccaaacttgtcagctggggaaaagccacacaaagcccagctgcccaccttcacatccttatccttgtaggagcataaaatggtgtcatcactgcccagttctaaccaagcttcagttaaagaatgggtaccttcacatcttcactatttttcaggggccttaccgtccttgaccacccaagtaaaatctaaatcagccttcttttgggttcttcagttcaagcaaggcctcttcttgtggcctctcagtattaatatttatgaggttgcagattgaatttttgggcctgagatacaagccatcaatgaggtgtgacaaagcatgtcaatgaataataagaaaattatctattcttccatatcctcccctgtaataagggttgtcagaatgccttctttctgggctgggttgaggattcagtgagaacatatgtgacacagctggtgggctattaagctctggctttgctccctgttaaaatgccagaacccttgagagggatcccacattgagccatgtttatcactgaccaccttagaatggatggatttctcagatttttcctgagatcaatgcttgatggagaggagaggagaacaatagattcttgggatgtgtgttatgcatgtgtttaagtaagagacagagagtatgtttatttgcaggttgtgtgtgtaaagtcagagcctgcctccagaggatcttctctaaccaccattgcttaggtcctgttcgtttgcatctacagcgaatgaccttacagccatctgacttggcttcactcaccactcagctcctgcctaaacagacgaggtggttagcatccaccataagttttccaaggagtagcaaagcacaaaggacacctattgggttgaaaagagcctagaggcatgagtcctgtgtgtgacttgttcatagtcatgcagctagtgtatagctaggattctcccctgctgatttactatgtgacactaggcagcaatctgcccttgctggacctcggttttctaatctgtaaaatgtgtggagtaaaactacatgagatgggaagtcccttctagtgcagatgccatggttattgaaaactgcagcaacatctttcttaatcgtaaggggaaagaaaaagaccatttactactcctagaacagttttggagctagaatattcacatttgcactcaataattatttacaaaacaactagtgtggagagggtcaaaacaacagctgagtcctgtgtaatagatattgtcaaccccttgatggatgaggaaggggctcaaagggaa

SEQ ID NO: 2 - DNA, 6489 bp, homo sapiens
aggtacctttggggctggctttctcaaggaagcccagctccctgtgattgagaatgaagtgtgcaatcgctatgactgggattgggacacactttctgggcactgctggccagtcccaaaatggaacataaggaagtggttcttctacttcttttatttctgaaatcagcagcacctgagcaaagccatgtggtccaggattgctaccatggtgatggacagagttatcgaggcacgtactccaccactgtcacaggaaggacctgccaagcttggtcatctatgacaccacatcaacataataggaccacagaaaactacccaaatgctggcttgatcatgaactactgcaggaatccagatgctgtggcagctccttattgttatacgagggatcccggtgtcaggtgggagtactgcaacctgacgcaatgctcagacgcagaagggactgccgtcgcgcctccgactgttaccccggttccaagcctagaggctccttccgaacaagcaccgactgagcaaaggcctggggtgcaggagtgctaccatggtaatggacagagttatcgaggcacatactccaccactgtcacaggaagaacctgccaagcttggtcatctatgacaccacactcgcatagtcggaccccagaatactacccaaatgctggcttgatcatgaactactgcaggaatccagatgctgtggcagctccttattgttatacgagggatcccggtgtcaggtgggagtactgcaacctgacgcaatgctcagacgcagaagggactgccgtcgcgcctccgactgttaccccggttccaagcctagaggctccttccgaacaagcaccgactgagcaaaggcctggggtgcaggagtgctaccatggtaatggacagagttatcgaggcacatactccaccactgtcacaggaagaacctgccaagcttggtcatctatgacaccacactcgcatagtcggaccccagaatactacccaaatgctggcttgatcatgaactactgcaggaatccagatgctgtggcagctccttattgttatacgagggatcccggtgtcaggtgggagtactgcaacctgacgcaatgctcagacgcagaagggactgccgtcgcgcctccgactgttaccccggttccaagcctagaggctccttccgaacaagcaccgactgagcagaggcctggggtgcaggagtgctaccacggtaatggacagagttatcgaggcacatactccaccactgtcactggaagaacctgccaagcttggtcatctatgacaccacactcgcatagtcggaccccagaatactacccaaatgctggcttgatcatgaactactgcaggaatccagatgctgtggcagctccttattgttatacgagggatcccggtgtcaggtgggagtactgcaacctgacgcaatgctcagacgcagaagggactgccgtcgcgcctccgactgttaccccggttccaagcctagaggctccttccgaacaagcaccgactgagcaaaggcctggggtgcaggagtgctaccatggtaatggacagagttatcgaggcacatactccaccactgtcacaggaagaacctgccaagcttggtcatctatgacaccacactcgcatagtcggaccccagaatactacccaaatgctggcttgatcatgaactactgcaggaatccagatgctgtggcagctccttattgttatacgagggatcccggtgtcaggtgggagtactgcaacctgacgcaatgctcagacgcagaagggactgccgtcgcgcctccgactgttaccccggttccaagcctagaggctccttccgaacaagcaccgactgagcaaaggcctggggtgcaggagtgctaccatggtaatggacagagttatcgaggcacatactccaccactgtcacaggaagaacctgccaagcttggtcatctatgacaccacactcgcatagtcggaccccagaatactacccaaatgctggcttgatcatgaactactgcaggaatccagatgctgtggcagctccttattgttatacgagggatcccggtgtcaggtgggagtactgcaacctgacgcaatgctcagacgcagaagggactgccgtcgcgcctccgactgttaccccggttccaagcctagaggctccttccgaacaagcaccgactgagcaaaggcctggggtgcaggagtgctaccatggtaatggacagagttatcgaggcacatactccaccactgtcacaggaagaacctgccaagcttggtcatctatgacaccacactcgcatagtcggaccccagaatactacccaaatgctggcttgatcatgaactactgcaggaatccagatgctgtggcagctccttattgttatacgagggatcccggtgtcaggtgggagtactgcaacctgacgcaatgctcagacgcagaagggactgccgtcgcgcctccgactgttaccccggttccaagcctagaggctccttccgaacaagcaccgactgagcagaggcctggggtgcaggagtgctaccacggtaatggacagagttatcgaggcacatactccaccactgtcactggaagaacctgccaagcttggtcatctatgacaccacactcgcatagtcggaccccagaatactacccaaatgctggcttgatcatgaactactgcaggaatccagatcctgtggcagccccttattgttatacgagggatcccagtgtcaggtgggagtactgcaacctgacacaatgctcagacgcagaagggactgccgtcgcgcctccaactattaccccgattccaagcctagaggctccttctgaacaagcaccaactgagcaaaggcctggggtgcaggagtgctaccacggaaatggacagagttatcaaggcacatacttcattactgtcacaggaagaacctgccaagcttggtcatctatgacaccacactcgcatagtcggaccccagcatactacccaaatgctggcttgatcaagaactactgccgaaatccagatcctgtggcagccccttggtgttatacaacagatcccagtgtcaggtgggagtactgcaacctgacacgatgctcagatgcagaatggactgccttcgtccctccgaatgttattctggctccaagcctagaggctttttttgaacaagcactgactgaggaaacccccggggtacaggactgctactaccattatggacagagttaccgaggcacatactccaccactgtcacaggaagaacttgccaagcttggtcatctatgacaccacaccagcatagtcggaccccagaaaactacccaaatgctggcctgaccaggaactactgcaggaatccagatgctgagattcgcccttggtgttacaccatggatcccagtgtcaggtgggagtactgcaacctgacacaatgcctggtgacagaatcaagtgtccttgcaactctcacggtggtcccagatccaagcacagaggcttcttctgaagaagcaccaacggagcaaagccccggggtccaggattgctaccatggtgatggacagagttatcgaggctcattctctaccactgtcacaggaaggacatgtcagtcttggtcctctatgacaccacactggcatcagaggacaacagaatattatccaaatggtggcctgaccaggaactactgcaggaatccagatgctgagattagtccttggtgttataccatggatcccaatgtcagatgggagtactgcaacctgacacaatgtccagtgacagaatcaagtgtccttgcgacgtccacggctgtttctgaacaagcaccaacggagcaaagccccacagtccaggactgctaccatggtgatggacagagttatcgaggctcattctccaccactgttacaggaaggacatgtcagtcttggtcctctatgacaccacactggcatcagagaaccacagaatactacccaaatggtggcctgaccaggaactactgcaggaatccagatgctgagattcgcccttggtgttataccatggatcccagtgtcagatgggagtactgcaacctgacgcaatgtccagtgatggaatcaactctcctcacaactcccacggtggtcccagttccaagcacagagcttccttctgaagaagcaccaactgaaaacagcactggggtccaggactgctaccgaggtgatggacagagttatcgaggcacactctccaccactatcacaggaagaacatgtcagtcttggtcgtctatgacaccacattggcatcggaggatcccattatactatccaaatgctggcctgaccaggaactactgcaggaatccagatgctgagattcgcccttggtgttacaccatggatcccagtgtcaggtgggagtactgcaacctgacacgatgtccagtgacagaatcgagtgtcctcacaactcccacagtggccccggttccaagcacagaggctccttctgaacaagcaccacctgagaaaagccctgtggtccaggattgctaccatggtgatggacggagttatcgaggcatatcctccaccactgtcacaggaaggacctgtcaatcttggtcatctatgataccacactggcatcagaggaccccagaaaactacccaaatgctggcctgaccgagaactactgcaggaatccagattctgggaaacaaccctggtgttacacaaccgatccgtgtgtgaggtgggagtactgcaatctgacacaatgctcagaaacagaatcaggtgtcctagagactcccactgttgttccagttccaagcatggaggctcattctgaagcagcaccaactgagcaaacccctgtggtccggcagtgctaccatggtaatggccagagttatcgaggcacattctccaccactgtcacaggaaggacatgtcaatcttggtcatccatgacaccacaccggcatcagaggaccccagaaaactacccaaatgatggcctgacaatgaactactgcaggaatccagatgccgatacaggcccttggtgttttaccatggaccccagcatcaggtgggagtactgcaacctgacgcgatgctcagacacagaagggactgtggtcgctcctccgactgtcatccaggttccaagcctagggcctccttctgaacaagactgtatgtttgggaatgggaaaggataccggggcaagaaggcaaccactgttactgggacgccatgccaggaatgggctgcccaggagccccatagacacagcacgttcattccagggacaaataaatgggcaggtctggaaaaaaattactgccgtaaccctgatggtgacatcaatggtccctggtgctacacaatgaatccaagaaaactttttgactactgtgatatccctctctgtgcatcctcttcatttgattgtgggaagcctcaagtggagccgaagaaatgtcctggaagcattgtaggggggtgtgtggcccacccacattcctggccctggcaagtcagtctcagaacaaggtttggaaagcacttctgtggaggcaccttaatatccccagagtgggtgctgactgctgctcactgcttgaagaagtcctcaaggccttcatcctacaaggtcatcctgggtgcacaccaagaagtgaacctcgaatctcatgttcaggaaatagaagtgtctaggctgttcttggagcccacacaagcagatattgccttgctaaagctaagcaggcctgccgtcatcactgacaaagtaatgccagcttgtctgccatccccagactacatggtcaccgccaggactgaatgttacatcactggctggggagaaacccaaggtacctttgggactggccttctcaaggaagcccagctccttgttattgagaatgaagtgtgcaatcactataagtatatttgtgctgagcatttggccagaggcactgacagttgccagggtgacagtggagggcctctggtttgcttcgagaaggacaaatacattttacaaggagtcacttcttggggtcttggctgtgcacgccccaataagcctggtgtctatgctcgtgtttcaaggtttgttacttggattgagggaatgatgagaaataattaattggacgggagacagagtgaagcatcaacctacttagaagctgaaacgtgggtaaggatttagcatgctggaaataatagacagcaatcaaacgaagacactgttcccagctaccagctatgccaaaccttggcatttttggtatttttgtgtataagcttttaaggtctgactgacaaattctgtattaaggtgtcatagctatgacatttgttaaaaataaactctgcacttattttgatttga

SEQ ID NO: 3 - DNA, 14121 bp, homo sapiens
attcccaccgggacctgcggggctgagtgcccttctcggttgctgccgctgaggagcccgcccagccagccagggccgcgaggccgaggccaggccgcagcccaggagccgccccaccgcagctggcgatggacccgccgaggcccgcgctgctggcgctgctggcgctgcctgcgctgctgctgctgctgctggcgggcgccagggccgaagaggaaatgctggaaaatgtcagcctggtctgtccaaaagatgcgacccgattcaagcacctccggaagtacacatacaactatgaggctgagagttccagtggagtccctgggactgctgattcaagaagtgccaccaggatcaactgcaaggttgagctggaggttccccagctctgcagcttcatcctgaagaccagccagtgcaccctgaaagaggtgtatggcttcaaccctgagggcaaagccttgctgaagaaaaccaagaactctgaggagtttgctgcagccatgtccaggtatgagctcaagctggccattccagaagggaagcaggttttcctttacccggagaaagatgaacctacttacatcctgaacatcaagaggggcatcatttctgccctcctggttcccccagagacagaagaagccaagcaagtgttgtttctggataccgtgtatggaaactgctccactcactttaccgtcaagacgaggaagggcaatgtggcaacagaaatatccactgaaagagacctggggcagtgtgatcgcttcaagcccatccgcacaggcatcagcccacttgctctcatcaaaggcatgacccgccccttgtcaactctgatcagcagcagccagtcctgtcagtacacactggacgctaagaggaagcatgtggcagaagccatctgcaaggagcaacacctcttcctgcctttctcctacaacaataagtatgggatggtagcacaagtgacacagactttgaaacttgaagacacaccaaagatcaacagccgcttctttggtgaaggtactaagaagatgggcctcgcatttgagagcaccaaatccacatcacctccaaagcaggccgaagctgttttgaagactctccaggaactgaaaaaactaaccatctctgagcaaaatatccagagagctaatctcttcaataagctggttactgagctgagaggcctcagtgatgaagcagtcacatctctcttgccacagctgattgaggtgtccagccccatcactttacaagccttggttcagtgtggacagcctcagtgctccactcacatcctccagtggctgaaacgtgtgcatgccaacccccttctgatagatgtggtcacctacctggtggccctgatccccgagccctcagcacagcagctgcgagagatcttcaacatggcgagggatcagcgcagccgagccaccttgtatgcgctgagccacgcggtcaacaactatcataagacaaaccctacagggacccaggagctgctggacattgctaattacctgatggaacagattcaagatgactgcactggggatgaagattacacctatttgattctgcgggtcattggaaatatgggccaaaccatggagcagttaactccagaactcaagtcttcaatcctcaaatgtgtccaaagtacaaagccatcactgatgatccagaaagctgccatccaggctctgcggaaaatggagcctaaagacaaggaccaggaggttcttcttcagactttccttgatgatgcttctccgggagataagcgactggctgcctatcttatgttgatgaggagtccttcacaggcagatattaacaaaattgtccaaattctaccatgggaacagaatgagcaagtgaagaactttgtggcttcccatattgccaatatcttgaactcagaagaattggatatccaagatctgaaaaagttagtgaaagaagctctgaaagaatctcaacttccaactgtcatggacttcagaaaattctctcggaactatcaactctacaaatctgtttctcttccatcacttgacccagcctcagccaaaatagaagggaatcttatatttgatccaaataactaccttcctaaagaaagcatgctgaaaactaccctcactgcctttggatttgcttcagctgacctcatcgagattggcttggaaggaaaaggctttgagccaacattggaagctctttttgggaagcaaggatttttcccagacagtgtcaacaaagctttgtactgggttaatggtcaagttcctgatggtgtctctaaggtcttagtggaccactttggctataccaaagatgataaacatgagcaggatatggtaaatggaataatgctcagtgttgagaagctgattaaagatttgaaatccaaagaagtcccggaagccagagcctacctccgcatcttgggagaggagcttggttttgccagtctccatgacctccagctcctgggaaagctgcttctgatgggtgcccgcactctgcaggggatcccccagatgattggagaggtcatcaggaagggctcaaagaatgacttttttcttcactacatcttcatggagaatgcctttgaactccccactggagctggattacagttgcaaatatcttcatctggagtcattgctcccggagccaaggctggagtaaaactggaagtagccaacatgcaggctgaactggtggcaaaaccctccgtgtctgtggagtttgtgacaaatatgggcatcatcattccggacttcgctaggagtggggtccagatgaacaccaacttcttccacgagtcgggtctggaggctcatgttgccctaaaagctgggaagctgaagtttatcattccttccccaaagagaccagtcaagctgctcagtggaggcaacacattacatttggtctctaccaccaaaacggaggtgatcccacctctcattgagaacaggcagtcctggtcagtttgcaagcaagtctttcctggcctgaattactgcacctcaggcgcttactccaacgccagctccacagactccgcctcctactatccgctgaccggggacaccagattagagctggaactgaggcctacaggagagattgagcagtattctgtcagcgcaacctatgagctccagagagaggacagagccttggtggataccctgaagtttgtaactcaagcagaaggtgcgaagcagactgaggctaccatgacattcaaatataatcggcagagtatgaccttgtccagtgaagtccaaattccggattttgatgttgacctcggaacaatcctcagagttaatgatgaatctactgagggcaaaacgtcttacagactcaccctggacattcagaacaagaaaattactgaggtcgccctcatgggccacctaagttgtgacacaaaggaagaaagaaaaatcaagggtgttatttccataccccgtttgcaagcagaagccagaagtgagatcctcgcccactggtcgcctgccaaactgcttctccaaatggactcatctgctacagcttatggctccacagtttccaagagggtggcatggcattatgatgaagagaagattgaatttgaatggaacacaggcaccaatgtagataccaaaaaaatgacttccaatttccctgtggatctctccgattatcctaagagcttgcatatgtatgctaatagactcctggatcacagagtccctgaaacagacatgactttccggcacgtgggttccaaattaatagttgcaatgagctcatggcttcagaaggcatctgggagtcttccttatacccagactttgcaagaccacctcaatagcctgaaggagttcaacctccagaacatgggattgccagacttccacatcccagaaaacctcttcttaaaaagcgatggccgggtcaaatataccttgaacaagaacagtttgaaaattgagattcctttgccttttggtggcaaatcctccagagatctaaagatgttagagactgttaggacaccagccctccacttcaagtctgtgggattccatctgccatctcgagagttccaagtccctacttttaccattcccaagttgtatcaactgcaagtgcctctcctgggtgttctagacctctccacgaatgtctacagcaacttgtacaactggtccgcctcctacagtggtggcaacaccagcacagaccatttcagccttcgggctcgttaccacatgaaggctgactctgtggttgacctgctttcctacaatgtgcaaggatctggagaaacaacatatgaccacaagaatacgttcacactatcatgtgatgggtctctacgccacaaatttctagattcgaatatcaaattcagtcatgtagaaaaacttggaaacaacccagtctcaaaaggtttactaatattcgatgcatctagttcctggggaccacagatgtctgcttcagttcatttggactccaaaaagaaacagcatttgtttgtcaaagaagtcaagattgatgggcagttcagagtctcttcgttctatgctaaaggcacatatggcctgtcttgtcagagggatcctaacactggccggctcaatggagagtccaacctgaggtttaactcctcctacctccaaggcaccaaccagataacaggaagatatgaagatggaaccctctccctcacctccacctctgatctgcaaagtggcatcattaaaaatactgcttccctaaagtatgagaactacgagctgactttaaaatctgacaccaatgggaagtataagaactttgccacttctaacaagatggatatgaccttctctaagcaaaatgcactgctgcgttctgaatatcaggctgattacgagtcattgaggttcttcagcctgctttctggatcactaaattcccatggtcttgagttaaatgctgacatcttaggcactgacaaaattaatagtggtgctcacaaggcgacactaaggattggccaagatggaatatctaccagtgcaacgaccaacttgaagtgtagtctcctggtgctggagaatgagctgaatgcagagcttggcctctctggggcatctatgaaattaacaacaaatggccgcttcagggaacacaatgcaaaattcagtctggatgggaaagccgccctcacagagctatcactgggaagtgcttatcaggccatgattctgggtgtcgacagcaaaaacattttcaacttcaaggtcagtcaagaaggacttaagctctcaaatgacatgatgggctcatatgctgaaatgaaatttgaccacacaaacagtctgaacattgcaggcttatcactggacttctcttcaaaacttgacaacatttacagctctgacaagttttataagcaaactgttaatttacagctacagccctattctctggtaactactttaaacagtgacctgaaatacaatgctctggatctcaccaacaatgggaaactacggctagaacccctgaagctgcatgtggctggtaacctaaaaggagcctaccaaaataatgaaataaaacacatctatgccatctcttctgctgccttatcagcaagctataaagcagacactgttgctaaggttcagggtgtggagtttagccatcggctcaacacagacatcgctgggctggcttcagccattgacatgagcacaaactataattcagactcactgcatttcagcaatgtcttccgttctgtaatggccccgtttaccatgaccatcgatgcacatacaaatggcaatgggaaactcgctctctggggagaacatactgggcagctgtatagcaaattcctgttgaaagcagaacctctggcatttactttctctcatgattacaaaggctccacaagtcatcatctcgtgtctaggaaaagcatcagtgcagctcttgaacacaaagtcagtgccctgcttactccagctgagcagacaggcacctggaaactcaagacccaatttaacaacaatgaatacagccaggacttggatgcttacaacactaaagataaaattggcgtggagcttactggacgaactctggctgacctaactctactagactccccaattaaagtgccacttttactcagtgagcccatcaatatcattgatgctttagagatgagagatgccgttgagaagccccaagaatttacaattgttgcttttgtaaagtatgataaaaaccaagatgttcactccattaacctcccattttttgagaccttgcaagaatattttgagaggaatcgacaaaccattatagttgtagtggaaaacgtacagagaaacctgaagcacatcaatattgatcaatttgtaagaaaatacagagcagccctgggaaaactcccacagcaagctaatgattatctgaattcattcaattgggagagacaagtttcacatgccaaggagaaactgactgctctcacaaaaaagtatagaattacagaaaatgatatacaaattgcattagatgatgccaaaatcaactttaatgaaaaactatctcaactgcagacatatatgatacaatttgatcagtatattaaagatagttatgatttacatgatttgaaaatagctattgctaatattattgatgaaatcattgaaaaattaaaaagtcttgatgagcactatcatatccgtgtaaatttagtaaaaacaatccatgatctacatttgtttattgaaaatattgattttaacaaaagtggaagtagtactgcatcctggattcaaaatgtggatactaagtaccaaatcagaatccagatacaagaaaaactgcagcagcttaagagacacatacagaatatagacatccagcacctagctggaaagttaaaacaacacattgaggctattgatgttagagtgcttttagatcaattgggaactacaatttcatttgaaagaataaatgatgttcttgagcatgtcaaacactttgttataaatcttattggggattttgaagtagctgagaaaatcaatgccttcagagccaaagtccatgagttaatcgagaggtatgaagtagaccaacaaatccaggttttaatggataaattagtagagttgacccaccaatacaagttgaaggagactattcagaagctaagcaatgtcctacaacaagttaagataaaagattactttgagaaattggttggatttattgatgatgctgtgaagaagcttaatgaattatcttttaaaacattcattgaagatgttaacaaattccttgacatgttgataaagaaattaaagtcatttgattaccaccagtttgtagatgaaaccaatgacaaaatccgtgaggtgactcagagactcaatggtgaaattcaggctctggaactaccacaaaaagctgaagcattaaaactgtttttagaggaaaccaaggccacagttgcagtgtatctggaaagcctacaggacaccaaaataaccttaatcatcaattggttacaggaggctttaagttcagcatctttggctcacatgaaggccaaattccgagagactctagaagatacacgagaccgaatgtatcaaatggacattcagcaggaacttcaacgatacctgtctctggtaggccaggtttatagcacacttgtcacctacatttctgattggtggactcttgctgctaagaaccttactgactttgcagagcaatattctatccaagattgggctaaacgtatgaaagcattggtagagcaagggttcactgttcctgaaatcaagaccatccttgggaccatgcctgcctttgaagtcagtcttcaggctcttcagaaagctaccttccagacacctgattttatagtccccctaacagatttgaggattccatcagttcagataaacttcaaagacttaaaaaatataaaaatcccatccaggttttccacaccagaatttaccatccttaacaccttccacattccttcctttacaattgactttgtcgaaatgaaagtaaagatcatcagaaccattgaccagatgcagaacagtgagctgcagtggcccgttccagatatatatctcagggatctgaaggtggaggacattcctctagcgagaatcaccctgccagacttccgtttaccagaaatcgcaattccagaattcataatcccaactctcaaccttaatgattttcaagttcctgaccttcacataccagaattccagcttccccacatctcacacacaattgaagtacctacttttggcaagctatacagtattctgaaaatccaatctcctcttttcacattagatgcaaatgctgacatagggaatggaaccacctcagcaaacgaagcaggtatcgcagcttccatcactgccaaaggagagtccaaattagaagttctcaattttgattttcaagcaaatgcacaactctcaaaccctaagattaatccgctggctctgaaggagtcagtgaagttctccagcaagtacctgagaacggagcatgggagtgaaatgctgttttttggaaatgctattgagggaaaatcaaacacagtggcaagtttacacacagaaaaaaatacactggagcttagtaatggagtgattgtcaagataaacaatcagcttaccctggatagcaacactaaatacttccacaaattgaacatccccaaactggacttctctagtcaggctgacctgcgcaacgagatcaagacactgttgaaagctggccacatagcatggacttcttctggaaaagggtcatggaaatgggcctgccccagattctcagatgagggaacacatgaatcacaaattagtttcaccatagaaggacccctcacttcctttggactgtccaataagatcaatagcaaacacctaagagtaaaccaaaacttggtttatgaatctggctccctcaacttttctaaacttgaaattcaatcacaagtcgattcccagcatgtgggccacagtgttctaactgctaaaggcatggcactgtttggagaagggaaggcagagtttactgggaggcatgatgctcatttaaatggaaaggttattggaactttgaaaaattctcttttcttttcagcccagccatttgagatcacggcatccacaaacaatgaagggaatttgaaagttcgttttccattaaggttaacagggaagatagacttcctgaataactatgcactgtttctgagtcccagtgcccagcaagcaagttggcaagtaagtgctaggttcaatcagtataagtacaaccaaaatttctctgctggaaacaacgagaacattatggaggcccatgtaggaataaatggagaagcaaatctggatttcttaaacattcctttaacaattcctgaaatgcgtctaccttacacaataatcacaactcctccactgaaagatttctctctatgggaaaaaacaggcttgaaggaattcttgaaaacgacaaagcaatcatttgatttaagtgtaaaagctcagtataagaaaaacaaacacaggcattccatcacaaatcctttggctgtgctttgtgagtttatcagtcagagcatcaaatcctttgacaggcattttgaaaaaaacagaaacaatgcattagattttgtcaccaaatcctataatgaaacaaaaattaagtttgataagtacaaagctgaaaaatctcacgacgagctccccaggacctttcaaattcctggatacactgttccagttgtcaatgttgaagtgtctccattcaccatagagatgtcggcattcggctatgtgttcccaaaagcagtcagcatgcctagtttctccatcctaggttctgacgtccgtgtgccttcatacacattaatcctgccatcattagagctgccagtccttcatgtccctagaaatctcaagctttctcttccacatttcaaggaattgtgtaccataagccatatttttattcctgccatgggcaatattacctatgatttctcctttaaatcaagtgtcatcacactgaataccaatgctgaactttttaaccagtcagatattgttgctcatctcctttcttcatcttcatctgtcattgatgcactgcagtacaaattagagggcaccacaagattgacaagaaaaaggggattgaagttagccacagctctgtctctgagcaacaaatttgtggagggtagtcataacagtactgtgagcttaaccacgaaaaatatggaagtgtcagtggcaaaaaccacaaaagccgaaattccaattttgagaatgaatttcaagcaagaacttaatggaaataccaagtcaaaacctactgtctcttcctccatggaatttaagtatgatttcaattcttcaatgctgtactctaccgctaaaggagcagttgaccacaagcttagcttggaaagcctcacctcttacttttccattgagtcatctaccaaaggagatgtcaagggttcggttctttctcgggaatattcaggaactattgctagtgaggccaacacttacttgaattccaagagcacacggtcttcagtgaagctgcagggcacttccaaaattgatgatatctggaaccttgaagtaaaagaaaattttgctggagaagccacactccaacgcatatattccctctgggagcacagtacgaaaaaccacttacagctagagggcctctttttcaccaacggagaacatacaagcaaagccaccctggaactctctccatggcaaatgtcagctcttgttcaggtccatgcaagtcagcccagttccttccatgatttccctgaccttggccaggaagtggccctgaatgctaacactaagaaccagaagatcagatggaaaaatgaagtccggattcattctgggtctttccagagccaggtcgagctttccaatgaccaagaaaaggcacaccttgacattgcaggatccttagaaggacacctaaggttcctcaaaaatatcatcctaccagtctatgacaagagcttatgggatttcctaaagctggatgtaaccaccagcattggtaggagacagcatcttcgtgtttcaactgcctttgtgtacaccaaaaaccccaatggctattcattctccatccctgtaaaagttttggctgataaattcattactcctgggctgaaactaaatgatctaaattcagttcttgtcatgcctacgttccatgtcccatttacagatcttcaggttccatcgtgcaaacttgacttcagagaaatacaaatctataagaagctgagaacttcatcatttgccctcaacctaccaacactccccgaggtaaaattccctgaagttgatgtgttaacaaaatattctcaaccagaagactccttgattcccttttttgagataaccgtgcctgaatctcagttaactgtgtcccagttcacgcttccaaaaagtgtttcagatggcattgctgctttggatctaaatgcagtagccaacaagatcgcagactttgagttgcccaccatcatcgtgcctgagcagaccattgagattccctccattaagttctctgtacctgctggaattgtcattccttcctttcaagcactgactgcacgctttgaggtagactctcccgtgtataatgccacttggagtgccagtttgaaaaacaaagcagattatgttgaaacagtcctggattccacatgcagctcaaccgtacagttcctagaatatgaactaaatgttttgggaacacacaaaatcgaagatggtacgttagcctctaagactaaaggaacacttgcacaccgtgacttcagtgcagaatatgaagaagatggcaaatttgaaggacttcaggaatgggaaggaaaagcgcacctcaatatcaaaagcccagcgttcaccgatctccatctgcgctaccagaaagacaagaaaggcatctccacctcagcagcctccccagccgtaggcaccgtgggcatggatatggatgaagatgacgacttttctaaatggaacttctactacagccctcagtcctctccagataaaaaactcaccatattcaaaactgagttgagggtccgggaatctgatgaggaaactcagatcaaagttaattgggaagaagaggcagcttctggcttgctaacctctctgaaagacaacgtgcccaaggccacaggggtcctttatgattatgtcaacaagtaccactgggaacacacagggctcaccctgagagaagtgtcttcaaagctgagaagaaatctgcagaacaatgctgagtgggtttatcaaggggccattaggcaaattgatgatatcgacgtgaggttccagaaagcagccagtggcaccactgggacctaccaagagtggaaggacaaggcccagaatctgtaccaggaactgttgactcaggaaggccaagccagtttccagggactcaaggataacgtgtttgatggcttggtacgagttactcaaaaattccatatgaaagtcaagcatctgattgactcactcattgattttctgaacttccccagattccagtttccggggaaacctgggatatacactagggaggaactttgcactatgttcataagggaggtagggacggtactgtcccaggtatattcgaaagtccataatggttcagaaatactgttttcctatttccaagacctagtgattacacttcctttcgagttaaggaaacataaactaatagatgtaatctcgatgtatagggaactgttgaaagatttatcaaaagaagcccaagaggtatttaaagccattcagtctctcaagaccacagaggtgctacgtaatcttcaggaccttttacaattcattttccaactaatagaagataacattaaacagctgaaagagatgaaatttacttatcttattaattatatccaagatgagatcaacacaatcttcaatgattatatcccatatgtttttaaattgttgaaagaaaacctatgccttaatcttcataagttcaatgaatttattcaaaacgagcttcaggaagcttctcaagagttacagcagatccatcaatacattatggcccttcgtgaagaatattttgatccaagtatagttggctggacagtgaaatattatgaacttgaagaaaagatagtcagtctgatcaagaacctgttagttgctcttaaggacttccattctgaatatattgtcagtgcctctaactttacttcccaactctcaagtcaagttgagcaatttctgcacagaaatattcaggaatatcttagcatccttaccgatccagatggaaaagggaaagagaagattgcagagctttctgccactgctcaggaaataattaaaagccaggccattgcgacgaagaaaataatttctgattaccaccagcagtttagatataaactgcaagatttttcagaccaactctctgattactatgaaaaatttattgctgaatccaaaagattgattgacctgtccattcaaaactaccacacatttctgatatacatcacggagttactgaaaaagctgcaatcaaccacagtcatgaacccctacatgaagcttgctccaggagaacttactatcatcctctaattttttaaaagaaatcttcatttattcttcttttccaattgaactttcacatagcacagaaaaaattcaaactgcctatattgataaaaccatacagtgagccagccttgcagtaggcagtagactataagcagaagcacatatgaactggacctgcaccaaagctggcaccagggctcggaaggtctctgaactcagaaggatggcattttttgcaagttaaagaaaatcaggatctgagttattttgctaaacttgggggaggaggaacaaataaatggagtctttattgtgtatcata

SEQ ID NO: 4 - DNA, 3964 bp, homo sapiens
ctactccaggctgtgttcagggcttggggctggtggagggaggggcctgaaattccagtgtgaaaggctgagatgggcccgaggcccctggcctatgtccaagccatttcccctctcaccagcctctccctggggagccagtcagctaggaaggaatgagggctccccaggcccacccccagttcctgagctcatctgggctgcagggctggcgggacagcagcgtggactcagtctcctagggatttcccaactctcccgcccgcttgctgcatctggacaccctgcctcaggccctcatctccactggtcagcaggtgacctttgcccagcgccctgggtcctcagtgcctgctgccctggagatgatataaaacaggtcagaaccctcctgcctgtctgctcagttcatccctagaggcagctgctccaggtaatgccctctggggaggggaaagaggaggggaggaggatgaagaggggcaagaggagctccctgcccagcccagccagcaagcctggagaagcacttgctagagctaaggaagcctcggagctggacgggtgccccccacccctcatcataacctgaagaacatggaggcccgggaggggtgtcacttgcccaaagctacacagggggtggggctggaagtggctccaagtgcaggttcccccctcattcttcaggcttagggctggaggaagccttagacagcccagtcctaccccagacagggaaactgaggcctggagagggccagaaatcacccaaagacacacagcatgttggctggactggacggagatcagtccagaccgcaggtgccttgatgttcagtctggtgggttttctgctccatcccacccacctccctttgggcctcgatccctcgcccctcaccagtcccccttctgagagcccgtattagcagggagccggcccctactccttctggcagacccagctaaggttctaccttaggggccacgccacctccccagggaggggtccagaggcatggggacctggggtgcccctcacaggacacttccttgcaggaacagaggtgccatgcagccccgggtactccttgttgttgccctcctggcgctcctggcctctgcccgtaagcacttggtgggactgggctgggggcagggtggaggcaacttggggatcccagtcccaatgggtggtcaagcaggagcccagggctcgtccagaggccgatccaccccactcagccctgctctttcctcaggagcttcagaggccgaggatgcctcccttctcagcttcatgcagggttacatgaagcacgccaccaagaccgccaaggatgcactgagcagcgtgcaggagtcccaggtggcccagcaggccaggtacacccgctggcctccctccccatcccccctgccagctgcctccattcccacccgcccctgccctggtgagatcccaacaatggaatggaggtgctccagcctcccctgggcctgtgcctcttcagcctcctctttcctcacagggcctttgtcaggctgctgcgggagagatgacagagttgagactgcattcctcccaggtccctcctttctccccggagcagtcctagggcgtgccgttttagccctcatttccattttcctttcctttccctttctttctctttctatttctttctttctttctttctttctttctttctttctttctttctttctttctttctttctttctttcctttctttctttcctttctttctttcctttctttctttctttcctttctttctctttctttctttctttcctttttctttctttccctctcttcctttctctctttctttcttcttcttttttttttaatggagtctccctctgtcacctaggctggagtgcagtggtgccatctcggctcactgcaacctccgtctcccgggttcaacccattctcctgcctcagcctcccaagtagctgggattacaggcacgcgccaccacacccagctaatttttgtatttttagcagagatggggtttcaccatgttggccaggttggtcttgaattcctgacctcaggggatcctcctgcctcggcctcccaaagtgctgggattacaggcatgagccactgcgcctggccccattttccttttctgaaggtctggctagagcagtggtcctcagcctttttggcaccagggaccagttttgtggtggacaatttttccatgggccagcggggatggttttgggatgaagctgttccacctcagatcatcaggcattagattctcataaggagccctccacctagatccctggcatgtgcagttcacaatagggttcacactcctatgagaatgtaaggccacttgatctgacaggaggcggagctcaggcggtattgctcactcacccaccactcacttcgtgctgtgcagcccggctcctaacagtccatggaccagtacctatctatgacttgggggttggggacccctgggctaggggtttgccttgggaggccccacctgacccaattcaagcccgtgagtgcttctgctttgttctaagacctggggccagtgtgagcagaagtgtgtccttcctctcccatcctgcccctgcccatcagtactctcctctcccctactcccttctccacctcaccctgactggcattagctggcatagcagaggtgttcataaacattcttagtccccagaaccggctttggggtaggtgttattttctcactttgcagatgagaaaattgaggctcagagcgattaggtgacctgccccagatcacacaactaatcaatcctccaatgactttccaaatgagaggctgcctccctctgtcctaccctgctcagagccaccaggttgtgcaactccaggcggtgctgtttgcacagaaaacaatgacagccttgacctttcacatctccccaccctgtcactttgtgcctcaggcccaggggcataaacatctgaggtgacctggagatggcagggtttgacttgtgctggggttcctgcaaggatatctcttctcccagggtggcagctgtgggggattcctgcctgaggtctcagggctgtcgtccagtgaagttgagagggtggtgtggtcctgactggtgtcgtccagtggggacatgggtgtgggtcccatggttgcctacagaggagttctcatgccctgctctgttgcttcccctgactgatttaggggctgggtgaccgatggcttcagttccctgaaagactactggagcaccgttaaggacaagttctctgagttctgggatttggaccctgaggtcagaccaacttcagccgtggctgcctgagacctcaataccccaagtccacctgcctatccatcctgcgagctccttgggtcctgcaatctccagggctgcccctgtaggttgcttaaaagggacagtattctcagtgctctcctaccccacctcatgcctggcccccctccaggcatgctggcctcccaataaagctggacaagaagctgctatgagtgggccgtcgcaagtgtgccatctgtgtctgggcatgggaaagggccgaggctgttctgtgggtgggcactggacagactccaggtcaggcaggcatggaggccagcgctctatccaccttctggtagctgggcagtctctgggcctcagtttcttcatctctaaggtaggaatcaccctccgtaccctgccttccttgacagctttgtgcggaaggtcaaacaggacaataagtttgctgatactttgataaactgttaggtgctgcacaacatgacttgagtgtgtgccccatgccagccactatgcctggcacttaagttgtcatcagagttgagactgtgtgtgtttactcaaaactgtggagctgacctcccctatccaggccccctagccct

SEQ ID NO: 5 - DNA, 533 bp, homo sapiens
tgctcagttcatccctagaggcagctgctccaggaacagaggtgccatgcagccccgggtactccttgttgttgccctcctggcgctcctggcctctgcccgagcttcagaggccgaggatgcctcccttctcagcttcatgcagggttacatgaagcacgccaccaagaccgccaaggatgcactgagcagcgtgcaggagtcccaggtggcccagcaggccaggggctgggtgaccgatggcttcagttccctgaaagactactggagcaccgttaaggacaagttctctgagttctgggatttggaccctgaggtcagaccaacttcagccgtggctgcctgagacctcaataccccaagtccacctgcctatccatcctgcgagctccttgggtcctgcaatctccagggctgcccctgtaggttgcttaaaagggacagtattctcagtgctctcctaccccacctcatgcctggcccccctccaggcatgctggcctcccaataaagctggacaagaagctgctatg

SEQ ID NO: 6 - DNA, 2480 bp, homo sapiens
tttgcttcccctcttcccgaagctctgacacctgccccaacaagcaatgttggaaaattatttacatagtggcgcaaactcccttactgctttggatataaatccaggcaggaggaggtagctctaaggcaagagatctgggacttctagcccctgaactttcagccgaatacatcttttccaaaggagtgaattcaggcccttgtatcactggcagcaggacgtgaccatggagaagctgttgtgtttcttggtcttgaccagcctctctcatgcttttggccagacaggtaagggccaccccaggctatgggagagttttgatctgaggtatgggggtggggtctaagactgcatgaacagtctcaaaaaaaaaaaaaaaagactgtatgaacagaacagtggagcatccttcatggtgtgtgtgtgtgtgtgtgtgtgtgtgtgtggtgtgtaactggagaaggggtcagtctgtttctcaatcttaaattctatacgtaagtgaggggatagatctgtgtgatctgagaaacctctcacatttgcttgtttttctggctcacagacatgtcgaggaaggcttttgtgtttcccaaagagtcggatacttcctatgtatccctcaaagcaccgttaacgaagcctctcaaagccttcactgtgtgcctccacttctacacggaactgtcctcgacccgtgggtacagtattttctcgtatgccaccaagagacaagacaatgagattctcatattttggtctaaggatataggatacagttttacagtgggtgggtctgaaatattattcgaggttcctgaagtcacagtagctccagtacacatttgtacaagctgggagtccgcctcagggatcgtggagttctgggtagatgggaagcccagggtgaggaagagtctgaagaagggatacactgtgggggcagaagcaagcatcatcttggggcaggagcaggattccttcggtgggaactttgaaggaagccagtccctggtgggagacattggaaatgtgaacatgtgggactttgtgctgtcaccagatgagattaacaccatctatcttggcgggcccttcagtcctaatgtcctgaactggcgggcactgaagtatgaagtgcaaggcgaagtgttcaccaaaccccagctgtggccctgaggccagctgtgggtcctgaaggtacctcccggttttttacaccgcatgggccccacgtctctgtctctggtacctcccgcttttttacactgcatggttcccacgtctctgtctctgggcctttgttcccctatatgcattgaggcctgctccaccctcctcagcgcctgagaatggaggtaaagtgtctggtctgggagctcgttaactatgctgggaaatggtccaaaagaatcagaatttgaggtgttttgttttcatttttatttcaagttggacagatcttggagataatttcttacctcacatagatgagaaaactaacacccagaaaggagaaatgatgttataaaaaactcataaggcaagagctgagaaggaagcgctgatcttctatttaattccccacccatgacccccagaaagcaggagcattgcccacattcacagggctcttcagtctcagaatcaggacactggccaggtgtctggtttgggtccagagtgctcatcatcatgtcatagaactgctgggcccaggtctcctgaaatgggaagcccagcaataccacgcagtccctccactttctcaaagcacactggaaaggccattagaattgccccagcagagcagatctgctttttttccagagcaaaatgaagcactaggtataaatatgttgttactgccaagaacttaaatgactggtttttgtttgcttgcagtgctttcttaattttatggctcttctgggaaactcctccccttttccacacgaaccttgtggggctgtgaattctttcttcatccccgcattcccaatatacccaggccacaagagtggacgtgaaccacagggtgtcctgtcagaggagcccatctcccatctccccagctccctatctggaggatagttggatagttacgtgttcctagcaggaccaactacagtcttcccaaggattgagttatggactttgggagtgagacatcttcttgctgctggatttccaagctgagaggacgtgaacctgggaccaccagtagccatcttgtttgccacatggagagagactgtgaggacagaagccaaactggaagtggaggagccaagggattgacaaacaacagagccttgaccacgtggagtctctgaatcagccttgtctggaaccagatctacacctggactgcccaggtctataagccaataaagcccctgtttacttgagtgagtccaagctgttttctgatagttgctttagaagttgtgactaacttctctatgacctttgaa

SEQ ID NO: 7 - DNA, 1842 bp, homo sapiens
cgatcagatcgatctaagatggcgactgtcgaaccggaaaccacccctactcctaatcccccgactacagaagaggagaaaacggaatctaatcaggaggttgctaacccagaacactatattaaacatcccctacagaacagatgggcactctggttttttaaaaatgataaaagcaaaacttggcaagcaaacctgcggctgatctccaagtttgatactgttgaagacttttgggctctgtacaaccatatccagttgtctagtaatttaatgcctggctgtgactactcactttttaaggatggtattgagcctatgtgggaagatgagaaaaacaaacggggaggacgatggctaattacattgaacaaacagcagagacgaagtgacctcgatcgcttttggctagagacacttctgtgccttattggagaatcttttgatgactacagtgatgatgtatgtggcgctgttgttaatgttagagctaaaggtgataagatagcaatatggactactgaatgtgaaaacagagaagctgttacacatatagggagggtatacaaggaaaggttaggacttcctccaaagatagtgattggttatcagtcccacgcagacacagctactaagagcggctccaccactaaaaataggtttgttgtttaagaagacaccttctgagtattctcataggagactgcgtcaagcaatcgagatttgggagctgaaccaaagcctcttcaaaaagcagagtggactgcatttaaatttgatttccatcttaatgttactcagatataagagaagtctcattcgcctttgtcttgtacttctgtgttcattttttttttttttttttggctagagtttccactatcccaatcaaagaattacagtacacatccccagaatccataaatgtgttcctggcccactctgtaatagttcagtagaattaccattaattacatacagattttacctatccacaatagtcagaaaacaacttggcatttctatactttacaggaaaaaaaattctgttgttccattttatgcagaagcatattttgctggtttgaaagattatgatgcatacagttttctagcaattttctttgtttctttttacagcattgtctttgctgtactcttgctgatggctgctagattttaatttatttgtttccctacttgataatattagtgattctgatttcagtttttcatttgttttgcttaaattttttttttttttttcctcatgtaacattggtgaaggatccaggaatatgacacaaaggtggaataaacattaattttgtgcattctttggtaattttttttgttttttgtaactacaaagctttgctacaaatttatgcatttcattcaaatcagtgatctatgtttgtgtgatttcctaaacataattgtggattataaaaaatgtaacatcataattacattcctaactagaattagtatgtctgtttttgtatctttatgctgtattttaacactttgtattacttaggttattttgctttggttaaaaatggctcaagtagaaaagcagtcccattcatattaagacagtgtacaaaactgtaaataaaatgtgtacagtgaattgtcttttagacaactagatttgtccttttatttctccatctttatagaaggaatttgtacttcttattgcaggcaagtctctatattatgtcctcttttgtggtgtcttccatgtgaacagcataagtttggagcactagtttgattattatgtttattacaatttttaataaattgaataggtagtatcatatatatgga

SEQ ID NO: 8 - DNA, 18001 bp, homo sapiens
gaagtcatcagcaatgcaactgttcacatggaggatactccctgcttgaggggtcagacaggcctgctgggcaacccaggaggcttggatgaccgtctaccccagtgtttttgggatggaaagttccacattctgagaaccctcagtccctgggcaacctggggtggttagtcaccacagcttgtggcttgggcccatgacagcaggtagaaatgacgtggactgccgccagccgggcacagtggctcacgcctgtaatcccagcactttgggaggctgaggcatgtggatcacttgaggtcaggagttcgaaaccagcctggtcaacacggtgaaaccccatctctgctaaaaaaaaaaaatatatatatataaattagccaggcatggtgacgtgcacctgtggtcccagctactcaggaggctgaggcacaagaatcacttgaacccgggaggtggaggttgcagtgagattgcaccagtgcactctccagcctggcaacagagcaagactctgtctcaaacaaacaaaacaaaacaaacaaaaagacgtaagatgtggaccgctggagaatgggggtgctgcctgcagtcaaaacggagtgggggtgcccagctcagggccagaatgatcctattcccggcacttctcagtgaggctctgtggctcacctaagaaaccagcctcccttgcaggcaacggcctagctggcctggtctggaggctctcttcaaatatttacatccacacccaagatacagtcttgagatttgactcgcatgattgctatgggacaagttttcatctgcagtttaaatctgtttcccaacttacattaggggtttggaattctagatcgtatttgaagtgttggtgccacacacaccttaacacctgcacgctggcaacaaaaccgtccgctctgcagcacagctggggtcacctgacctttctcctgtcccccccacttgagctcagtggctgggcagcaggggatgcatggccactggccggccaggtgcagctctcagctggggtgttcagaggacgcctgtgtcctcccctcccccatccctctgtcacccttggaggcagagaactttgcccgtcagtcccatggggaatgtcaacaggcaggggcagcactgcagagatttcatcatggtctcccaggccctcaggctcctctgccttctgcttgggcttcagggctgcctggctgcaggtgcgtccggggaggttttctccataaacttggtggaagggcagtgggcaaatccaggagccagcccgggcttcccaaaccccgcccttgctccggacacccccatccaccaggagggttttctggcggctcctgttcaatttctttccttctagaaaccagcatccaggcacaggaggggaggcccttcttggtggcccaggctttggcgggattatttttcaaagaactttaggagtgggtggtgctttcctggcccccatgggcccctgcctgtgaggtcggacaagcgcagggagtctggggcctctcagagtgcaggaagtgcgcacagggtgctcccaggctggggagcacaggtaggggacggtgcgtgggggatggcgcctggggcatgggggatggggtgtgggaaacggcatgtggggcgtaggggatggggtgtggaggatcgggggtggggatggcgtgtggggtgtgggggatgggccgtgggggggtggggcctgggaaacagcatgtggggcatggggtgtgggggtgaggtgtgggaaagtgtgtggggtgtgggggatggggcatggaaagggcgtgtggggtgcaggggatggggcatggaggtgtgggggatggggtgtgtggggtgtcggggatggggcatgtggggtgtgggggatggggcatggaaagggcgtgtggggtgcagaggatggggcatgggggggtggggatggcgagtggggctggggcctgggaatggtgagtggggcatggggatggcgagtagggggtgtggcgtgaggatggctagtggggcgtggggatggcgtgtggggatggcgagtggggggtgggctgtgagggacagtgcctgggatgtggggctgcagccctagctcacagcatggccttatgaccccggccaccttcctgccccaggcggggtcgctaaggcctcaggaggagaaacacgggacatgccgtggaagccggggcctcacagaggtgagcagggactgccactggttttgtcctggggcccagtgggggccaacatcacctccttcccctcccatggcaaagagccagcccgcggggtggctactgcagtgccccccaaggagggtgttccctgctcgagaggaagtgaccgctccagcttggccttccctgggactggggtgcaggcgattttatcttctttgctccattctgttccttccagataatcgtgtgttcttcatcaggttttcctcagttcttgagagcttttctgatgcaaatctgctttcaccccagggcggtcaccggctctgctcacaccagcctccaagggtgtgggtgtcccgggagtgtgggtgtcccgggggcgtgggtgtcccaggagtgtgggtgtcccgggggcgtgggtgtcccgggagtgtgggtgtcccgggggcgtgggtgtcccgggagtgtgggtgtcccggaggcgagggtgtcccgggagtgtgggtgtcccgggggagtgggtgtcccgggagtgtgggtgtcccggaggcgagggtgtcccgggagtgtgggtgtcccgggggcgtgggtgtcccgggagtgtgggtgtcccgggggagtgggtgtcccgggagtgtgggtgtcccggaggcgagggtgtcccgggagtgtgggtgtcccgggggagtgggtgtcccgggagtgtgggtgtcccggaggcgagggtgtcccgggagtgtgggtgtcccgggggcgtgggtgtcccgggagcgtgggtgtcccgggggcgtgggtgtcccgggagtgtgggtgtcccgggggcgtgggtgtcccgggagtgtgggtgtcccgggggcgtgggtgtcccgggagtgtgggtgtcccgggagtgtgggtgttccggaggcgagggtgtcccgggagtgtgcgtgtcccgggggcgtgggtgtcccgggggcgtgggtgtcccgggggcgtgggtgttccggaggcgagggtatcccagaagtgtgagtgtcccaggggcgtgggtgtcccgggggtgtgggtgtcccgggggcgtgggtgtcccgggagtgtgggtgttccggaggtgagggtgtcccgggagtgtgggtgttccggaggcgagggtgtcccgggagtgtgggtgtcccgggggcgtgggtgtcccgggagtgtgggtgttccggaggtgagggtgtcccgggagtgtgggtgttccggaggcgagggtgtcccgggagtgtgggtgtcccaggggcgtgggtgtcccgggagtgtgggtgttccggaggcgagggtgtcccgggagtgtgggtgttccggaggcgagggtgtcccgggagtgtgggtgtcccgggggcgtgggtgtcccgggggttgtgggtgtcccgggagtgtgggtgttccggaggcgagggtgtcccgggagtgtgggtgttccggaggcgagggtgtcccgggagtgtgggtgtcccgggggtgtgggtgtcccgggggtgtgggtgtcccgggagtgtgggtgtcccgggggagtgggtgtcccgggagtgtgggtgttccggaggcgagggtgtcccaggagcgtgggtgtcccggaggcgagggtgtcccgggagcgtgggtgtcccgggggcgtgggtgtcccgggagtgtgggtgtcccgggggagtgggtgtcccgggagtgtgggtgtcccggaggcgagggtgtcccaggagtgtgggtgtcccgggggcgtgggtgtcccgggagtgtgggtgttccagaggcgagggtatcccagaagtgtgagtgtcccgggggtgtgggtgtcccgggggtcgtgggtgtcccgggagtgtgggtgttccagaggcgagggtgtcccgggagtgtgggtgtcccaggggtgtgggtgtcccgggggcgtgggtgtcccgggagtgtgggtgtcccgggggagtgggtgtcccgggagtgtgggtgttccggaggcgagggtgtcccgggagtgtgggtgttccggaggcgagggtgtcccgggagcgtgggtgtcccgggggcgtgggtgtcccgggagcgtgggtgtcccaggggtgtgggtgtcccgggggcgtgggtgtcccgggagtgtgggtgtcccgggggagtggatgtcccgggagtgtgggtgttccggaggcgagggtgtcccgggagtgtgggtgttccggaggcgagggtgtcccgggagtgtgggtgtcccgggggcgtgggtgtcccgggagtgtgggtgtcccgggggcgtgggtatcccagaagtgtgagtgtcccaggggcgtgggtgtccggggggcgtgggtgtcccgggggtgtgggtgtcccgggggtcgtgggtgtcccgggagcgtgggtgtcggggactgcagggacatgggcctcccctcccactcctgccgcccagggcacctcctgtgaggactcggagtccgtgagttcccacctccttgagcccgattctttggtgtccccgcctgcatcctcagcctccttccaaaccagaccagttctctaggggcgtcgacgtgtgaaactgattttaaagaaaacaggcagtggcctttctctcggccccacgtggcccagtagcgctcaccttccgtcccttcttccgcgctcagtaaccaatttaggccgctcctgcagaactcgggctcctgcccaccggcccacagcgtccacctgaggcctcgtcctcccagcaaaggtcgtccctccggaacgcgcctcctgcggcctctccagagcccctcccgcgcgtcctctcagccccgctcgcctcctcccggggcctccctctcccgcctgcccccaggcccgtctcccctcgcgggctgaggcaggttcgggcagcacggccgccccggggcgggggtcactctccaccaccgcgtggtgcccacagctcacggcgctcccgggtgacggtcccctcggctgtagggcgtcctgaagagcggcctgctcggagctgagcgcacggggttgcctcgccctgggcgtctctggccctcaccagccccgtcttcccatgggcaaaacggcggtcctgtttgtccacaagtaaccgtcggggttacggaggggccaggagctgcggcggggggctgtgctctcaggaccggccccaggaggatccgcgcgaggtctggagctctcaggggtcgcgggggacagaggggccccaagcggaggcggggaaggcggcagaagcccaggaccgccaagagctggcgaggaagcccggggctcgctgtcgggggagccgggcaggggccgcgcctcggaccaggacggaggcctggggaaggcggatctggccgccggagacgcggtgcgggtggagacgagggatttggatttccgcgggcggctgtacggatttccacgcgcggttcacgtgggccccagggggttgcccggcacccggggccgcgccgccttctcctcgccggcatcgacccgcagcctcacgtttacgcggcggcgcccgcagcccccttcggcccggcttccgcgcgtgcccccgagcgcgccctcgggatcagcccccggaagcagagaggccaggccgggaaggatgggcgacgggggtggctgacccgggagcacggcagggaggacacccagccaggcccgcgagcagcgccgctcccctcctccaggacgggcgggaacctgcgatgcccccgccgcgtgggccgtggggcggtctccgaggcactgggcggggcacgcggtgggcgcttcacggaactcgcatttcccagtcttcgtaacccaggaggaagcccacggcgtcctgcaccggcgccggcgcgccaacgcgttcctggaggagctgcggccgggctccctggagagggagtgcaaggaggagcagtgctccttcgaggaggcccgggagatcttcaaggacgcggagaggacggtgagcccagcctcggggcgccccgcgccgcggacactgcaggcggcggtgaaccaggccgcgtggggccgcctgcgtctctttggctgcggctgtgggcggcgaacacgcagcggcgcccgcgcggcgctttctgcgggggtcgctttccgcccggggtgactccgctttcctgggcgatgccccccacccccaggcacgcgctctccccgtgcggccgcaccgcgcatgccggttttcacatcagaaaatacgatttgcaaagcacacttagggtgtcccccttaacttcccaagggagtccccccagtccccgaagggtccagggcagcctgcgcatcgcagacgcgcgcggctcgcagaagggacgtggtgagaagctggcccacagcatgccaccagcggcacctcctcagggcacgtgtcggggagaaacaacacttagggacctgggactttctccagctcacgctcacgggtcacctcacactccaagatcacctcaaagaggacacctcacacagggcacacttcacactcacaggtcacctcacactcacaggacacctcacactcacagggcacacttcacactcacgggtcacctcacactccaagatcacctcaaagaggacacctcacacagggcacacttcacactcacaggtcacctcacactcacaggacacctcacactcacagggcacacttcacactcacgggtcacctcacactccaagatcacctcaaagaggacacctcacacagggcacacttcacactcacgggtcacctcacactcacaggacacctcacacaagacacctcacacggggcacacttcacactcacaggtcacctcacacccacaggacacctcacacagggcacacttcacactcacgggtcacctcacactcacaggacacctcacacaagacacctcacacggggcacacttcacactcacaggtcacctcacacccacaggacacctcacacagggcacacttcacactcacgggtcacctcacactcacaggacacctcacactcagggcgcacttcacactcacgggtcacctcacacccacaggacacctcacagaggtcacctcacacaggacacctcacactcagggtgcacttcaaacccacaggtcatttcacctcacactcacaggacacctcacacaagataccacacggggcacacttcacactcacaggtcacctcacactcacaggacacctcacagaggtcacctcacacggggcacacttcacactcacaggtcacctcacacccacaggacacctcacagaggtcacctcacacccacaggacacctcacacaggacacctcacagaggtcacctcacacccacaggacacctcacactcataggtcacctcagtcttacaggacaactcacactcacaggtcaccttactctcacaggacacctcacactcacaggtcaccttactctcacaggacacctcactctcacaggacacctcacacagggcacacttcactcccacaggtcaccatacctcacacagatcacctcatactcacagatcacttcattctcacaggatacctcacactcagggcacacttcacactcacaggtcacacctcacacagatcatctcattctcacaggacacctccctctcacaggtcacctcacactcacaggacacctcacagaggtcacctcacacccacaggacacctcacagaggtcacctcacacggggcacacttcacactcaggtcacctcacacccacaggacacctcacagaggtcacctcacacccacaggacaactcacagaggtcacctcacacaggacacctcacaaaggtcacctcacacccacaggacacctcacactcataggtcacctcagtcttacaggacaactcacactcacaggtcaccttactctcacaggacacctcacactcacaggtcaccttactctcacaggacacctcacacagggcacacttcactcccacaggtcaccatacctcacacagatcacctcatactcacagatcacttcattctcacaggatacctcacactcagggcacacttcacactcacaggtcacacctcacacagatcatctcattctcacaggacacctccctctcacaggtcaccttacactcatctcacactcacaggtcgccacacctcacactcacaggatgcctcacactcacagaaccacatctcatatgcacaagacacctcacactcaggacacctcatgctcaaagaagcctcacactcacaggaggtccagctgtctgaggcaaaggctaacatgaccctttccagacaaattgaggatggtcatgcctagcatttttatacacctagttttgaaagcatttctcatctgttgtattctcacagcaccccgtgagtttaagttcaggtggccaacagtttcttcagcaatcacttttttctgtggagtgcttttgctgtttgtggaatattttgcatctgctactgcaccctctccccgtatgtgtggccaccctgtcagaggtggagctgtggctcagagcctgtgtacctcgtcccaggtccacagctcagcgacagaagagtcagggttgaacctcgggtgttctgacttgggagcaggaaatgtgtggtcacccatagttccagatgtcctggggaggggccaagattagaagaaacctacctcagctccagaggaaagtctggcttcctgagcccaccccgccagacccaggtccaagtcccccaaccccagttcatggtgtgtccagtgcttaccgttgggtgctctggtgaaggtgcatctcacgaggcttgctctcttgttccttcagaagctgttctggatttcttacagtggtgagtggatgatcaccaccagtcctgcctgcaacccttctcagcttactgacaccagcccactccacagatggggaccagtgtgcctcaagtccatgccagaatgggggctcctgcaaggaccagctccagtcctatatctgcttctgcctccctgccttcgagggccggaactgtgagacgcgtaaggccccactttgggtcccatatttgcagagggccctggggagctggtggaggtggcctggccaaccgggctgcagggtgcacaacctggtggggtgtgtaggccgggcattcagggctcagccccagttggaaattggtctaggtgaccttgaaatcccttccagtctgaggtctttgacagggacccaaggttctgattatcagactcagtggccccttgggctcccggccctgggcaattctcagccctcgagatggcccagctgagagtccctgtgtccctgtcccacttccacatcccaccacgcaggaccgcttggtaaacttccccttctctactttccattacaaaggtttgaggggtttgttttttttttaaccatctgaatattaaattatcacaaagtttgaggcccccaacctcccttgggttcagtaattcactagaaggactcatagaatccactgaagtggatacactcacaggtaccgtttattacagcaaaggatgcaggcttaagtctgcagagggaccaggcacaagcttccccttgtcctctccctgtggggtcatgtggacagtccttaattctcccagaatgacgtgtgacgagacgtgggaagtactgccaacttgggaagctctacgagccccggtgtccagaggttttatcagggctcaatcacatagacccagctgaccacccgcatggctgacctcagtctcagcccctccagaggctacgccgatagtgcggcccaaggccccaccatacatcacattgtcagctagaccatccagcatggctcaaggcccaggtaaacaccaacattccctcaggcaagaccttccaagggcttagcggtcatttcccaggagccaaggcaaaggctaccctttctctggcacagcagttcatccttgaccacccaagaccacattcttacactgaatgagctctcctgtgcagcagccattttcttctctaagcagaagagagcccagcaagctggaggaggctgaagagagaggcttcctgctggtcatctgggtccagaatgcctggagatctctgctcagccctggtgcccagcagccctggtgtgcatcctgcagggcaggccttcccgccggagtcctggacttgctcagggccactccccttgcccatgtcaaccaaagtcaggctgccggttctgcttcttctgtctgagcccatgaccagtgctgggactaactgtccccaggcgggctcacggtggtacgaggccagcttggagaactgtctcagctctctggtcctctcgtcagttgggtctctgattggaaagtcccttggacacttttaccatccccattggactttcactttcccccaggctcccatcagctgctcggaagagtggtcaccctggaggccactgcccaccagccaggcaccccccaaatgcaaccgcagccagcactgccagccactggcaaggctgttcagacatgtggctcctctgatccacgccttgtcctttggatcagtccacggagcaggtggtgccaagctcaggctctgtcacccacagctcagtgccaccttccaggcagaacaccactgctgacccagggcatggccaccccgggggctggctctcgctgacccccagaagcccctctcagggtgtccccttcctgtccccagacaaggatgaccagctgatctgtgtgaacgagaacggcggctgtgagcagtactgcagtgaccacacgggcaccaagcgctcctgtcggtgccacgaggggtactctctgctggcagacggggtgtcctgcacacccacaggtgaccaggcttcatgtcccagtcccagatgacaccagtccctgtcccactacggattatcttactggacaaaagacgggtgggagtggcttcacatctactgagcactaactatgcactgaccaattgtgaggtgggatctgggcaccaagggtggcacaggccagagcgacagtgactaggatgggcaccctgggggcaatccctgaatggcctcaggccccctgccaattctaggcagaccaggggagccaagcaaggcactatctcacgtccaactcccactcgcaggacctccgccagggttcatgaatctacttcggcacagccaatgtctgtactgactgctgcccactctgcattccaaaactcgtaaaggctcctgggaaaatgggatgtttctccaaaccagcctggaacgaatgggctgcacttccaaaagcagggacaccccacacccactgtgtctcaaagaggcggacgtgcccaccctggccacacagcctgggactcagcctgccacctcctcgggcttcctttctggcccaagaccttgattgaagcagatcaaaactaagcatgggatcaaaacaacacagtttgattcatctttaggtagaatttcattcaccttctactaaagtcaaacaacacatcttctccctgaaaagtgagcagagggcggttttaagacgtaagccctctgtttcctccaaaaccagccctgaccattgtctcctcagccagccacttcttcaagggcctctcatggccgggccccaccagtcaggcccagccgaggccctgccttccaccacccctgggccctgggagctcctgctcctgggggcctcccatagcctcggcctcaaggcctctcagaggatgggtgtttctgaatctttcctagtggcacgttcatccctcacaaatctctgcatctttctgacttttgttttacacagttgaatatccatgtggaaaaatacctattctagaaaaaagaaatgccagcaaaccccaaggccgaattgtggggggcaaggtgtgccccaaaggggagtgtccatggcaggtaaggcttcccctggcttcaggattccaagccctgagggtcttgaagccttttgaatgtgaacaacagctctggaagggaaaatgggcaggtcagccccaagcccaccaggctccaagtcagcacacctagcacctccagctcgcggcacccccatgcttttagtggggcaaggaaggagaaaagaaaacgacactcactgagggtctaccctgtgcagagaaccctgcgagatgccccatccgagttgtcacgtcgtcctcacggttactctttgaggtgggatctttgcctgatctttgcaaaatcaggagcattggatcaaagctatgtgaagatcctgtgaggtgaacagtgaaatctcacagcgacatttgtattcttgggccgtgcccaagagcacgtctcggctagagaggggcacagcctcccagagccaggtctgagcagctttgcctgggagggatctgcaaagaccccaggatttcagaaagaaattgtgcaatgccagaggttccttggcatgcccgggagggcgagtcatcagagaaacaatgacagcaatgtgacttccacacctcctgtccccccgcccaggtcctgttgttggtgaatggagctcagttgtgtggggggaccctgatcaacaccatctgggtggtctccgcggcccactgtttcgacaaaatcaagaactggaggaacctgatcgcggtgctgggtgggtaccactctcccctgtccgaccgcggtgctgggtgggtgccactcttccctgtccgaccgcggtgctgggtgggtgccactctcccctgtccgaccgcggtgctgggtgggtgccactctcccctgtccgaccgcggtgctgggtgggtgccactctccgctgtccgaccgcggtgctgggtgggtaccactctcccctgtctgaccgcagctctcaagtgtctcaggggctgtggctctgggcttcgtgctgtcacttccacagacagacagacatccccaaaaggggagcaaccatgctgggcacgactgctgtggccaccgtgctctcagccactttcccatgcccaaataaaacgataaaagactgggggcttctgcccatcctgcctcacttgaccaagagcccagaagaggatgcgacacccagggcctcatgggaccaccggctggcaggggttctgctcactgggtttatgggtgagacgagcactcccaggagggccactgggccgggaagaactgtggagaatcggggcacgccctgtcctcccagctgccagggcacagcatcccttccccacctcaacacccagaccccagattcaccccagttcacttgtccccacacgagccacaggctgccacctggggcaggctggccccaccttggggttagatgcaggtccccttgccccagaaggagactgcagcccctgcagacctagaaatggccacagcccatccccatgcaccagggggtgaggtggcaggtggtggaaagggcctgaggggggcttcttccttccaggcgagcacgacctcagcgagcacgacggggatgagcagagccggcgggtggcgcaggtcatcatccccagcacgtacgtcccgggcaccaccaaccacgacatcgcgctgctccgcctgcaccagcccgtggtcctcactgaccatgtggtgcccctctgcctgcccgaacggacgttctctgagaggacgctggccttcgtgcgcttctcattggtcagcggctggggccagctgctggaccgtggcgccacggccctggagctcatggtcctcaacgtgccccggctgatgacccaggactgcctgcagcagtcacggaaggtgggagactccccaaatatcacggagtacatgttctgtgccggctactcggatggcagcaaggactcctgcaagggggacagtggaggcccacatgccacccactaccggggcacgtggtacctgacgggcatcgtcagctggggccagggctgcgcaaccgtgggccactttggggtgtacaccagggtctcccagtacatcgagtggctgcaaaagctcatgcgctcagagccacgcccaggagtcctcctgcgagccccatttccctagcccagcagccctggcctgtggagagaaagccaaggctgcgtcgaactgtcctggcaccaaatcccatatattcttctgcagttaatggggtagaggagggcatgggagggagggagaggtggggagggagacagagacagaaacagagagagacagagacagagagagactgagggagagactctgaggacatggagagagactcaaagagactccaagattcaaagagactaatagagacacagagatggaatagaaaagatgagaggcagaggcagacaggcgctggacagaggggcaggggagtgccaaggttgtcctggaggcagacagcccagctgagcctccttacctcccttcagccaagcccacctgcacgtgatctgctggcctcaggctgctgctctgccttcattgctggagacagtagaggcatgaacacacatggatgcacacacacacacgccaatgcacacacacagagatatgcacacacacggatgcacacacagatggtcacacagagatacgcaaacacaccgatgcacacgcacatagagatatgcacacacagatgcacacacagatatacacatggatgcacgcacatgccaatgcacgcacacatcagtgcacacggatgcacagagatatgcacacaccgatgtgcgcacacacagatatgcacacacatggatgagcacacacacaccaatgcgcacacacaccgatgtacacacacagatgcacacacagatgcacacacaccgatgctgactccatgtgtgctgtcctctgaaggcggttgtttagctctcacttttctggttcttatccattatcatcttcacttcagacaattcagaagcatcaccatgcatggtggcgaatgcccccaaactctcccccaaatgtatttctcccttcgctgggtgccgggctgcacagactattccccacctgcttcccagcttcacaataaacggctgcgtctcctccgcacacctgtggtgcctgccacccactgggttgcccatgattcatttttggagcccccggtgctcatcctctgagatgctcttttctttcacaattttcaacatcactgaaatgaaccctcacatggaagctattttttaaaaacaaaagctgtttgatagatgtttgaggctgtagctcccaggatcctgtggaattggatgttctctccctgccacagcccttgtcaatgatatttcacagagaccctgggagcacctgctcaagagtcagggacacacgcatcactaaatgcaagttcccaggccctggctgcagtgggaggacctggcaagctgcactcttgctgagtccccagggtggtggaagaagaatgagaaacacatgaacagagaaatggggaggtgacaaacagtgcccccactcagactccggcaagcacggctcagagagtggactcgatgccatccctgcagggccgtcctgggcaccactggcactcacagcagcaaggtgggcaccattggcactcacagcagcaaggcaggcaccagcaacccacctcgggggcactcaggcatcatctacttcagagcagacagggtctatgaactacagccgtgggctgcttccaaggcaccctgctcttgtaaataaagttttatgggaacacacccatattagtgtccatggagtggccgtggcagagacgtccagccggacagaccagctgacccgccaagcccagcatggttagtgtcaggacctctgctgaagatgcttgctgaccctggccagaccccggttcctaatgccccctaaacgggacgggagccagtggcgggccctgatccaggtcagagctggctctgctttctcttttgtccgagtgaccatgcctcagtttcctcatgtgtaaaacaggagcccaccgtgatgcttatggtgggatgagatcagcatggatggaacaaggccctggaagggcccatgccatggtcatcgacagcaaagccactctgcagacagatgcttcagtgaattggtagaaaattctgcaaccagaatgcccggggctcctgagggcctaagcccagcccagggttctggaagccactctgacttcttgggagtggaagttggcaggactcttcctgggaagaagcggagggtggggatgagaggacagttcaggagcccacccagacccacaggaggaaactaggggagtcatgcggggtcctggtggagcgccagcctcccttcctgccaatgggaaatgcaggcgcccacctcatggtgctgccggaggagggggcccgggactccccagaggcttcgctgaagggcctgggcgcccccaaaggctacatgtttcatatgggacgtgccacctgccacggctcagctccagctttctgtgagtggcgagatagaatacggggaggccactggccatgggcctgggacagggtgggatgaggcggcaggcttgggccaccaaagccagcatcgccacccagcattgatgacaaagactgcgtgtctgccatgagcatcctgctgttggtgcacacaccgcattggtctctccatacaaacatgcctagaggcgatgtcagagggtggagaccaggagaggcaggagtcagacatctggtgccaccaggaaggcccttctcagaggaccaggctgtgcgtggtgcccgccgtgggaggccagcctggcgttggcatccagcatcatcagtttgtgcagtcgggtggggctcagtgagtgcctcctgtgtgccaggcacaatgacgcacaatgtgtgcacaccaggctcatgtgcaggtggctgcgagacagggcgacccatcaaggcagatgcaccatgaggcagtggccagtgctgtgggtgttaggggcattgctccccggccactacggcatagcaggcagtgatcgccacactggccaagctttagaccatttattccagagaccccagaggcaaaaagcccggctgcacctcccagtgactcccacagccattgagcagagacactcaggaccttgtgatgggaggtttctgcactggagaacgagcccagaagccctctcagcctcggaacagtgtggccagtggtgggcaggtcaggaggggcttcagacacagcctgtccctccagatggtcacgggaaggtcactccccacagaagtacgttttggggccatgcgggcacagaaggtttgggggtgggtggggcaggtgccagcctggcctgtgggaggccatggtgcagatgccaagccccccccgtgacatgagaccacctgataccacccagagagtggctgtgagcggaagggcccgcccagaaacaagcagggccttggggcagaagtcctgggctcagatcccacgctcactgccagcggcctcggctcaggcttctgcgctctctaaacttagttttctcttctggaaaaatgatggggaaaatgatatttgtatgtgaggactgagagttaaatgtaaacatctggaaactacaaaatgagcacgaaatgatgtttttattcttagaacagaaagtccccacacccgcggccctggtgactgatgaggatgaggttctgcggggcctctctggccgcccagctctgcctggggaaggtggggcca

SEQ ID NO: 9 - DNA, 3278 bp, homo sapiens
aggcacacaggcaaaatcaagttctacatctgtccctgtgtatgtcacttgtttgaatacgaaataaaattaaaaaaataaattcagtgtattgagaaagcaagcaattctctcaaggtatatttctgacatactaagattttaacgactttcacaaatatgctgtactgagagagaatgttacataacattgagaactagtacaagtaaatattaaagtgaagtgaccatttcctacacaagctcattcagaggaggatgaagaccattttggaggaagaaaagcacccttattaagaattgcagcaagtaagccaacaaggtcttttcaggatgattttcttatatcaagtggtacatttcattttatttacttcagtttctggtgaatgtgtgactcagttgttgaaggacacctgctttgaaggaggggacattactacggtcttcacaccaagcgccaagtactgccaggtagtctgcacttaccacccaagatgtttactcttcactttcacggcggaatcaccatctgaggatcccacccgatggtttacttgtgtcctgaaagacagtgttacagaaacactgccaagagtgaataggacagcagcgatttctgggtattctttcaagcaatgctcacaccaaataagcgcttgcaacaaagacatttatgtggacctagacatgaagggcataaactataacagctcagttgccaagagtgctcaagaatgccaagaaagatgcacggatgacgtccactgccactttttcacgtacgccacaaggcagtttcccagcctggagcatcgtaacatttgtctactgaagcacacccaaacagggacaccaaccagaataacgaagctcgataaagtggtgtctggattttcactgaaatcctgtgcactttctaatctggcttgtattagggacattttccctaatacggtgtttgcagacagcaacatcgacagtgtcatggctcccgatgcttttgtctgtggccgaatctgcactcatcatcccggttgcttgttttttaccttcttttcccaggaatggcccaaagaatctcaaagaaatctttgtctccttaaaacatctgagagtggattgcccagtacacgcattaaaaagagcaaagctctttctggtttcagtctacaaagctgcaggcacagcatcccagtgttctgccattcttcattttaccatgacactgatttcttgggagaagaactggatattgttgctgcaaaaagtcacgaggcctgccagaaactgtgcaccaatgccgtccgctgccagttttttacctataccccagcccaagcatcctgcaacgaagggaagggcaagtgttacttaaagctttcttcaaacggatctccaactaaaatacttcacgggagaggaggcatctctggatacacattaaggttgtgtaaaatggataatgagtgtaccaccaaaatcaagcccaggatcgttggaggaactgcgtctgttcgtggtgagtggccgtggcaggtgaccctgcacacaacctcacccactcagagacacctgtgtggaggctccatcattggaaaccagtggatattaacagccgctcactgtttctatggggtagagtcacctaagattttgcgtgtctacagtggcattttaaatcaatctgaaataaaagaggacacatctttctttggggttcaagaaataataatccatgatcagtataaaatggcagaaagcgggtatgatattgccttgttgaaactggaaaccacagtgaattacacagattctcaacgacccatatgcctgccttccaaaggagatagaaatgtaatatacactgattgctgggtgactggatgggggtacagaaaactaagagacaaaatacaaaatactctccagaaagccaagatacccttagtgaccaacgaagagtgccagaagagatacagaggacataaaataacccataagatgatctgtgccggctacagggaaggagggaaggacgcttgcaagggagattcgggaggccctctgtcctgcaaacacaatgaggtctggcatctggtaggcatcacgagctggggcgaaggctgtgctcaaagggagcggccaggtgtttacaccaacgtggtcgagtacgtggactggattctggagaaaactcaagcagtgtgaatgggttcccaggggccattggagtccctgaaggacccaggatttgctgggagagggtgttgagttcactgtgccagcatgcttcctccacagtaacacgctgaaggggcttggtgtttgtaagaaaatgctagaagaaaacaaactgtcacaagttgttatgtccaaaactcccgttctatgatcgttgtagtttgtttgagcattcagtctctttgtttttgatcacgcttctatggagtccaagaattaccataaggcaatatttctgaagattactatataggcagatatagcagaaaataaccaagtagtggcagtggggatcaggcagaagaactggtaaaagaagccaccataaatagatttgttcgatgaaagatgaaaactggaagaaaggagaacaaagacagtcttcaccattttgcaggaatctacactctgcctatgtgaacacatttcttttgtaaagaaagaaattgattgcatttaatggcagattttcagaatagtcaggaattcttgtcatttccattttaaaatatatattaaaaaaaatcagttcgagtagacacgagctaagagtgaatgtgaagataacagaatttctgtgtggaagaggattacaagcagcaatttacctggaagtgataccttaggggcaatcttgaagatacactttcctgaaaaatgatttgtgatggattgtatatttatttaaaatatcttgggaggggaggctgatggagatagggagcatgctcaaacctccctaagacaagctgctgctgtgactatgggctcccaaagagctagatcgtatatttatttgacaaaaatcaccatagactgcatccatactacagagaaaaaacaattagggcgcaaatggatagttacagtaaagtcttcagcaagcagctgcctgtattctaagcactgggattttctgtttcgtgcaaatatttatctcattattgttgtgatctagttcaataacctagaatttgaattgtcaccacatagctttcaatctgtgccaacaactatacaattcatcaagtgtg

SEQ ID NO: 10 - DNA, 162001 bp, homo sapiens
aggctgttgcgtatgtgagtctggagttcggaagagacatccaagttgctgacataaatttcggtcttcagtgtagaaatttgatttaaagccattgggttaaacaaaccaaccaaggtaagagtatttgcaggtaagagaagagacccaaggacttagccctaaggcactccagcattatgatgtaggggagatgaggaaccagcaaaggaggctgaatggaaacagagaaggaatggcgagttctgtgcaagagacaggaagaaagagaatgcaaaatggtcaaacaataaataattaagttgaattagatggtaaagaaataaatgcaaggaaatgcaaggccatagtcactgggcagacagagtaaaagaacatgatgaatcaggtgagattaatcacccctcctggaactatcagaaaaagatactcactgacagtgaggcagtcatgttagtccccaagttgatgactaatggaaactaaggtcacagtgcacattaatttcttttgaagcaaaggataaaaacaaacaaaatataaaagattaagatgtaaacgttagtgtacactaattcagagaagaattaaatgatttttaaaacttcaagaaggaggacagcattctaaatgcattgttctaaaacgatagtaagatgggataaatagtcacactagggtgatgattttggatgtgttaaatttgtcactttgagaccagatatgctccatttcacttcatgccagcttttaagaacatatatcatagaaaaagagaaaagaaacagttgaatcaaagtgaagagaaatattgtgaagcaaataaatccagggaaaaattaataaaaccctattcccaccctaaaaaaaagaaactaaaagaagtgcaaatataaagttcaataggagtcattagagattgtaaattgggctctgagcttcctaccaacaaaagcacaaaggaaaatatgatcactggtattaaaaaaaaacacctatggtttccaaaagattaaaacaaaccagcagttttatagaagctaacactaaaatctaaaggaactacgttctatggagccacttaatatggataaacactttgacaatattctttcaacaactacagtaacaagtttcttagagtccatttctttttacatccataatgaattgtaaatcttttctacttcttaagtaaaacatcaccacttaattctggtaacttttccatattaactttttagaacaattgcaaacgtaccataaatgattgttgtcacagtggtaactatttgaccctgactgttattttgtatatagcagcttttaaaataaaaaggcaacaagtttctaggcgtaatttccacagatcttttatgtaaaacaatgacatcctttgcaacttctgccatttaatctatctcaagcaagctctctggaaacaaatctatttgaaagattctattgtaattagaaatcagggtaactgaatgcactagatgaaaaccttctgactggggccaatgaagtcaataaagtcaaaactgctgtgaatgctcaactgtctgcagatcagatgtcttgggatggaatccgttctcgaggccaccatcattaatatcaatttggccatgtaatacaagcctcacttgttccactgttacaaatgtgcttaaaactgagctcatttacaatccaaatacatatgtaggatggtaaccaaggcatcacactaatttaggtattatgttttagggggaacaaaaggtatgttaatattttattcatctccaaattaactataaattgtgcattcttgcatagatcctccttgggaatgagaaattaggaaaatccagttgttaaaatgaatgcctaaaatcaaaataaaatttgtttttctggcacctgcttgatgacacagactaataaccaatgacaaaattgcccttgaacccaagttttcatttcctcctattgtgtggtcaggttatgtaagggtttgctttcaccccattcaaaaggtacctcttcctcttctcttgctccctctcgccctcattcttgtgcctatgcagacatttgagtagaggcgaatcactttcacttctgctggggaaattgcaacacgcttctttaaatggcagagagaaggagaaaacttagatcttctgataccaaatcactggaccttagaaggtcagaaatctttcaagccctgcaggaccgtaaaatgcgcatgtgtccaacggaagcactggggcatgagtggggaaggaatagaaacagaaagagggtaagagaagaaaaaagggaaagtggtgaaggcagggaggaaaattgcttagtgtgaatatgcacgcattcatttagttttcaaatccttgttgagcatgataaaattcccagcatcagacctcacatgttggtttccattaggatctgcctgggggaatatctgctgaatcagtggctctgagctgaactaggaaattcaccataattaggagagtcactgtatttctctccaaaaaaaaaaaagttatacccgagagacaggatcttctgatctgaaattttcttcacttctgaaattctctggtttgtgctcatcgttggtagctatttgttcatcaagagttgtgtagctggcttcttctgaaaaaaggaatctgcgtcatatctaagtcagatttcattctggtgctctcagagcagttagcccaggaaaggggccagcttctgtgacgactgctgcagaggcaggtgcagtttgtgtgccacagatattaactttgataagcacttaatgagtgccttctctgtgcgagaatggggaggaacaaaatgcagctcctaccctcctcgggctttagttgtaccttaataacaggaattttcatctgcctggctcctttcctcaaagaacaaagaagactttgcttcattaaagtgtctgagaaggaaggtaggttatatttttattcccattctatagctgggtaaagtgagttctaacaaagttacttgttaaaggtcactcagaggtcagagcatcagaaaaaaagacaatcacaaggctgatgttgtgtgctggatagtttaaactgaacaggaagaaaacatttttgtgggctttatctaaaaagaaatagtttgctctgagtttctcagtttcatttattcagcaagtatgtgccaagtgctattgtaggcaatgaagatacagcagggaacaaaacaaaactgacatggagcttccaactagaaaggagaacgagacaacgcgttttaaaatatatataatgtgttaggtaaaaagtgctataaggagagctaaaacacaatgagaggctagaagagtgatagtggcggaggggcttctctgaggagatgacatttgatcaggggtctgaataaagtaaagaggccagttatgtgaatatctggaagactcaaggggcagggcggaaatagccagtagaaaggccctgaggtaggaaggtgtgtggcaagtttgaggaaaaggaaagacagtctgactggagcaaagagaactggagctgaggccatcaaggcagccaggagccaggtgcagactgggctttgactctgcctgcagggaggaactgctgaaggttccaagcaaaggaccgccctgacctgccttaggtttgaacaggatccctctggctggtgtgtgaagaattaactgtagatgggcaagtgtggaaggaaggagagcagtcaggaagctgccataaccatctacatgagagaggtaaggcctcagatggaggggagcagtggaatggtggaaagtgtttattttgaatgttaagcctgcaggagttgctggaggattggacatgggggatgagaaaaagagagaggcttacagatcaggtaatttagctgatcttaagccccttacagcttaatattattccaaggtgccaataacagccaaggtaaacaaccttgtcttggacattctgcctttatttgcccacacaagatgaaattaaatatatatatatatatataatttaaataaataaattatatatatatataatttaaataaataaattatatatatatatatttagtgctgtttccatcagctactagctgagacacttgggcaaatgagggtgatctccagtcctcagtatccttgctgttaatgagagatggtcatttcttctctgcctagctcaaaagaatatgttaaataaaactctgtgaactttaggcagcacaggcttagggcttcttagtaacatcatcagcaccatcagagttaacttcatgagtcagttgagttgcctttggggtatatcattaacagattccaggaagctcccctgcccaaaagcctcccaccaatggcctgccttgttgaaagaattacacaattagcccaattcctttccattaaggcattgtggactccaaacatcctcctttaaaatggaaactaaatcgagctactgtcagtcatttgtccttttaggtgacgttatatatcagatcacttttctgccattagagctagttgaagtttgaatagggaaaaggaacgaatgaacgtggggcagagaacgcaatagtcggtgggttactcagtaggctgtggacagatggagaggatcccggtgggaggagcctctaaagataaactttctatgggaaaatgttgacagatttacctgagtcatggtttttcttacacctcataaaaatgaaggcttccaagggcagctccttgaaatagctgtaacaagtagccacagaagttgagttgcttaaagaaaaacattgaattcatggggaaccgtacgctttaatagcccctttggcttactttgtttaaacaaactcatcccgagcatctcacacttcaccaattttgagtgtccctgctttacctcagccttttaaagagtgtctttcccctaaatatttctggaaatgcctaagggtgctgacgtgcagccagaaatagttcacttctgtccccactatggcaggaatccatggaccaaggctctgatgtttccacaaagatgcccctcaggactagaaatctgtccccatccccgttgccaccacagtcaccatcacctggaaatcctgcaggaccaatgtttgtgaatttggaatatatgctagatgccttactaccttgttatgaccttatttctttatagcacttttaacctagcgcattacatattttaaatgtataattcagcgatccagatcactggtccagtgtcacctcccactcagcaaagtgagatgaacacacttggtgctacattcagctaggctggcactgtagatgcacccagtcccaggtattctagtggctcatgacagggcttcctcactggagacatgctgagccaagcaaggcagtttttaccaccaaccctgatagtcgtacacatattctgctcctccacccccaccaaggttgaaactccgctcctgtcagctttgcagctaccaccaccccctcagggagagtcatctctgttcccaaacccatataaatgtcattcaaagccagaggatgtaattgctgtagtaattgttatagtccactcatccaggggccccactgcaaagctgattaaaccatagtgttactaccttttacagagttattattcttccaaatcaacccactgcacctttctccaaggctacaaaagtgcccctagggtggctgtgtacaggcaagttttgatgtcagctgggaaactacctataacccccactctctgctaacaccaacttttctttttctattttattttattttattttactttaagttctgggatacatgtgcagaacgtgccggtttgttacacaggtatgcatgtgccatggtggcttgctgcacctatcaacccaccacctaggttttaagcctcgcatgcattaggtatttgtcctgatgctctccctccccttaccccccaccccctgacaggcccgggtatgtgatgttcccctccctgtgtccacatgttctcattgttcaactcccacttatgagtgagaacatgcataacaccaatttttcttattggaattgtagtgccagtttagttcttcagtggaagcacttgttcttctctataatctgttctccatctgggaacaccctactttctcagacataggtttgcagtgcattggtgggcaggatttcagtcctttctctgaaagttcctaagccctattgaaaaatgaatgcactggggaagggtgtggcccatctctctccccagaagctcctgagccacatttcttacccagtcccggaaccctggtatcctaaaccatgtctgaacctgtacccctgtggccccagaaagggaccaaacagtacatcccatgaaaccacaaagagatcataaccttctcctctctcctcccacatctctacataaacaacatttatatagatgactgaattcaagatacgtttatttggtactgatggtcaactggaagttcctaagcagaattacttataatgtgggactgtgtttttagtggttgcagtgaaggctcaacacccctaaacacggtgggaacttgctgaggaggcaggctgtgaagggcagggtattagcatctttccttaaaataacatgtgtcttagtgtgctcaggatgctacagtaaaaataccatagatttggtggcttaaacaacaaacatttatttctcacagtctggaggctgtgaagtccaagatcaaggcactgacagatccagtgtctggtaaaggcctgcatcctagttcatagcccgctgtcttctcactgtcctcaagaggctgaaagggtgagagagctcttccgagactctttcataagggcactaatcccattcatagggctccaccttcatgacctaattacttacaaaggccctacctcctaataccatcatattgggggttaggatttcaacgtatgaattttggggagacacaaacattcagtctatataacaacacgtaccgtgaaactttcctactcataaaagtaatatatcttcactggagaaagtaaaaaagtacagaaaaatatgtagaagaaaatctaccatcatctcacatccagagatatccatggtaaatattttaatacaattcctgtgaagttattcagtacacattaatagagtttgaaaacataatctaatataaaagcatgaaattcataaagatattttaaaataaagttaatatgtatgtgtgtatatgtatttttatatatacacaaacatatatgcttattatttttattgtgagcattcccccatattattagaaaaccatgattttttgttctttttctttttcttttcttttcttttttttttttggagatggagtctcactctctcacccaggctggagtgcagtggtgcaatcttggcttactgcaacctccacctcccaggctcaagcaattctcctgcctcagcctcccgagtaacagggattacaggcccctgccaccatgcccatctaatttttttgtatttttagtagagatggggtttcaccatgttggccaggctggtcttgaactcctgacctcaggtgatctgcccacctcggcctcccaaagtgctggaattacaggcataagccaccgcaccagaccaaaaaccatgatttttgatggcatcatcttatggatgcaatataattaatttaaccattcttctactagttaatattaaggtcatttccaacttttattgttgttacattgcctctcattttctttataaatatttggctctttttattttggatatgttgtagctaaaatgccatccagatagtttattctgatttagtgcccaccaggttctaggtgcatgactgccatagcagagatagttgcatacagttcaagtttagattttgtttgtgagcgggagaatccaaagaccaagttcctaatattcttttgcctgaaaaatggctacataaccttgccaaatctcttaacattttcatgcctttgtttctaatatggaaaatgaagatactcaccaatttgtaactgtaaactactacacaagaatgaggtattcatttaaccatatggtgagattttgtagttaaaattaattaattgtgctcagtggtcagactactggctttaaatcctggatccattattcattacttcctattgtgtaacctgggcaagttacttaacttctcttctccttagtttcctcatctataaaatgaataacagaagcacttaccataagtgaggatgagataagatggtggtatatgtgagtggtacacatctgttactattattatcattgttatttattattaagcagtgaatttagactcaatgtgaaatggtttagaagtcatcagcttcccgtttcatgttcttaaagcactggtgataagagtatgcctgtatcatgcagttataactttaatcaaaatatgaaagtaactttaatcaaaatgccaagtcaaattagcaaagtcagcccttttcaaaatgtgtgccctaaagtaataaggtctgcagggtgtgccccagggacctttggtggggagtgggtggtagtcagaatggcgaaaacagtggggatttttagggcccccactcacattgctttgcttttatagcaaaaattgttggctgatgaacaaaatcatttccttttcttggactcacagctagacctaacttcccaagtcctgtacagttaaatgttaccatacaattacagtggagccatatgtgtctgtctcaaccacccaagcctgccattgcagtgtgaaagcagccataggcaatacttaaacaaagggatgtgctgtgttccaataaaatgttaccaaactttcctatagtttgccagcccctgaactagagcatggtaaggcaagagagaattgtagaacgtggttggaaaggcagaaggagtcagggaggaaagaccttgtggaactctagcacaaagtttggattttatcctaaaagcagaagggaagcctttgaagggttttagaaaagggtatgacctgaattacagaagctcagtcctcagcagatcagtatttcaacattcactcaccatgtgaaccattgatcccattttgttacttcctctgtagaatctcctcttaaggaaattgaaagcaagctcctgaatgagatggcattttcagggaaagaccaggaggcagaccccaaggggcttcacaagatggcatttttgtggccttggtggatttgccatgaccttggcttggcaggatcagaaacctgaatctattcgcctgtaagtcctcttttcttgtaagtcctataagacttacactaagttcaggtgattaacatattaagtcaaaaagcccattttagtaatttttaatgaaaaacataattgccacatgtgagaagcccattctattttcatagacatacttatattagaataacaatgaccataatggttagcatttattaacaataacattgtgccaggcacagtgtcaagcattttccatgatgacctcacaagtctatcggtaggaattgtggttaaaaccctcttatagataaagtcagaggttctaaacttataagatcacaatgctagtgagtggtagagatgagatttgaacccacacagtgtaaaccagagtgtggatacctagccactacaacatagtgtctcataggagacatgttcagaaggttgctagtggacattgaatccatgggggaaaagaaggcagaaaaatctgattttaatgttatcaggttaatggggcctgatgcagccatcttgcagaagaacggtattgctagcaggtcctccatgtttgtttacaacactggctacggccttcccactaggatgggaattcccaaatcctataatttcctagatggtgctggaagaggcactgctgaggtttgttttgccaactatctttcccctcttcttcttgccttatttgtcattctatccattaaggtgacttttcatccattttatatgaatttcataattaacctctcagggtaattcccccagcccaccctactatcagggcagtccccaatatgactaatcattcccacatactaagaccacagactgcttcagaatctgtatttatattttcactattaaaaaactatgctatcgtttcctgaaatctctatgaaaaaaaaatactaagctatatctggagtgaaatggtcagtaagaacacagtttgtcacacaaaataatgaaaatgctatttcttacttatagtgcagactggggttcttcctctagaattagaaatattaggcttgctaagatgtgatggggagttcattggggctagtgttttagcttttgaactcttcaaaaggaacagaaatgaagaaaaagacctgctttaataaacaaggttaagtctgtatgatttatggacttatgagcaaatctgacatccactcacatgggtggtcctcccaagggataaacttcgtaaaagcacatttaagaaaaagggagcagatactgttggtgccctcttcaccaggagacacactgaaaggctgcagtagcacatcagagcctcacaggtcagcatcagccaaacagctgttctgtgcatcacaagaattcgtacatatttcaaaatgactaatttgtacctatgagacaggatttgacccactaatttttgtaccgtaacgttttaataaaaattgttttttcaaagcgaagctttgctgagcagatgaattatcatgtgggagtttaaaaattagtcaaaggagtcttgacaactaagtcctttaagcttggccttcccttggcctctgcctactcctgatcataatctgaataaactttaacttttcgactagaatgcaaaacacgtgtttttgtaaaacgaatattaatggcataactcgtgctttattattttagctgatttgtatcaatgtatcaacattccaaagaaaatagggagcatatgttggttaataatttttgttatgactattgacatgtaattcacatgacataaactttaccattttaaaaagtacaattcagtgagtttgagtatgttcttaattttgtacaaccatccccgctatcaaatttcaaagcatatccatcacaccaacaataaactctggttctattagtagtcactcccaattcccttttccctagccccctggcgaccactaattaattatttctctgtctctatggatttgcctaccatgaacattgcatataaatggaatcacacaatatgtagtcttttgtgtctggcaccttccactcaacatactgtattaaaggtttctccatgttatagcatgcatcgatccacacttcatttcctgttatggctgaataacattttgtcctctgaatctaccatatttgtttatccactcatgagctgatcacttaggctgttgccacttattagctattatgaataatgttgttatgaacgttcatgtacaagtttttgggcagacatgttatttctcctgggtaaattcctaggagttgaattgctgggtcatatagtaactctatgtttacctttttgagaaaactgccaatatgttttccacagtgtctgaaccattttataatttcgctggcaatgtatgagagttccactttctccacatcttcaccaacatttattttcctttttttaaaaaacaattattgctgtcctagtgggtatgaagtgatatctcctgtattttcaatttgcatttctgtaatgaataatgatattgtgcatcttttatgtgcttattggctagttgcacatcttctttagagaactatcaggtcatttgcctttttttgaaatgttggttgtctttttattgttgaaatataaaagttctttatatattctagatctagacctttactggatatatgacttgcaaattctaccatttctgtacgttgtctacaatttcaaccattctgtgggttgtctttttattttcttcacaacgtcttttgaagcagaatagtttttcattgtgatgaagtccagtttgactatttttttcttgtgcttttggtattgtaactaacaaaccattgactaatccgagattctgatgtacatacatgctttcttctaagttttataattttagcttttacatttaagtttttaatccattttgagttaattttttaaatattcttttgcatgtagctatccagttgtcccaatgctatttgttgaataggtgattctttcctcattgaatggtcttggtattcttgtaaaaaatcagttgactgtaggcatatgggtttctggactctcaattctacccgactgatctgaatgcctatcctcatgccagtactacactgtcttgattactgcagctttgtagtatgtaagtagtagtacgttttgtgagtcctcgaactttgcctttttttatagattgttttgctattttgagttaagtatttttttaaaacatcaagttaaaaatgaagctgccactctctaaaggaggacaatttcagaaaggcactgagacctgtgcttggtatgtagtaggtgcttttgaaaatgtttgttgcatggaatggattgatttcatctctattctaacactcaatgccatgttcatttcccctttggagcctttcatctctcccttctcttttctaagaaaatcagtaactctctcattcatacattgtacacatacatatctttatttgtttatgtgtctattttccactaattagactataatgccatataaggctagaattacatctaattcattgctgggtcccaaagccatgcttaagaccataagtatataggggttttttttcttttaaaaagtttttatttttaattattatggatacataagagttacagatatgtaaagggtacatgtgacattttgatacaagcatacaccatataatgatcaaatcagggtaactgggatatccgtcacctcaagcatttgtaatgtatttgtgttagaagcattgcaattccactcttagttattttgaaatatacaataaatttttgttaactgtagtcaccctgttgtctactgaacactagatcttattcctcatatctgactgcattttcgtatccattaaacacccctcttttttattttttattttatttattattattatactataagttttagggtacatgtgcacaatgtgcaggttagttacatatgtatacatgtgccatggtggtgcgctgcacccattaactcgtcatctagcattaggtatatctcccaatgctatccctcccccctccccacaccccacaacagtccccagagtgtgatgttccccttcctgtgtccatgtgttctcattgttcaattcccacctacgagtgagaatatgcggttaaacaccccctctttatcccccctccccactacccttcccagaccctagtaaccatcattctattctttctctctctgagttcccacatatgagcaagaaatgtgatatttgtctttctgtgcctggcttatttctcttgcataatgtcctccagttccatccatgttgatgaaagagacataatttcattcttttttatggctgaataacatttcattgtgtatatgtacaacattttctttattcatctgttggtggacacttaggttgattccataccttggctattgtgaatagtgctgcggtaaacatgggagtgcagatatctcttcgatatactgattttctttcttttgggtatatgtccagcagtgggattgctgggtaatatggtagctctattttgttgttgttgttgtttttaggaaccttcatactgttctccatagtggctgtactaatttacgttcccaccaacagtgtatgagggttcccctttctccacacttttgagagcatccgtaattccctgtctttttgatagaagcaattttcactgggatgagatgatatctcattgtagtttagacttatatttctctgatgattaaggatgttgagtatttttggccattcgtatgtcatctattcagatcttttgaccatttttaaatcaaattattttttcctattgagttgtttacacaacttatatattctgtttattaatcccttatcagataggtagcttccagatattttattccattctgtgagttgtctcttcactttgttgatggtttcctttgctgtgcagaagccttttagcttgaggtgatctcatttgtccacttttgcactggttgactgtgcttttgatgtcttattcaaaaaatatttggccagaccaatgtcatctcttgccatatacaaaaatcaaatcaaattggattaaaaacctaaatcgaaggcctgcaagtatgaaaccactagaataaaacaatatatatgtgttggagggagagaagaaagtaatgaagaaagaaaggccaggtgagaaagtaagagagaagggaaaatgaacaagaaagacaaaagtcattccaggcactgttttaaggggcatctcatttattcttacaaccttatgagataagcactcttactttcagtttgttcaggatgctataacagaatcccatagactgcgtgggttataaacaatagaaatttatttctcttagttctagtgactgggaagtccatgatcaaggcactgacagaactgttatctggtgaggacctgcttcctggtttacaaatggacagccatcttctcttcttgctttgtcctcacatggtgggaaggggtaaagaagctccctgaggcctcttttatatgggcactaatcccattcatgagggctctgccctcatgaccaaatcacctcccaaaggttccacctcctaatgccatcaccatggggttaggatttcaacaggaatttggaaaggacacagacattcagaacatagcacccccattttacagataagaacagtgagaaacagagagttaaataattttctcaaggtcatacaacgaacccgtagcctaggcagcctggctctttggtcatgttcttaaatactatgccatactgtctctcaaataaacactaaaatcaagatacttgggatgatcgttgggaggcagagcccagatatctatactttaaacaaattcccaaatgatctgatgggcaactcagatgaaaatcaatgcttcaagaaatagccaaataaaactctatggaaggtaaagatggggagagcttggtgagatgtcatacttgggaggaaaagccagggaaagtaagagaaaactgggtattagtaaagatcatggagaagggaaaacacaagatattgctaggctaaaaaagaggcagacctgatgaagcagtgaacaccacttcagccactccctaccttggccccagctggccctggctgtgactgtgttccatactctgcaatgacatgtaacttccaccacgtccatatcatacctaaagcctacttcagtgtgtccacaaaagcaagtaagaataaaaagtaagagaaacaactcacatttatttgctgcttattatgtgccaggctatgtccttttttttttgagatagagtctcactctgtcacccaggctggagtgcagtggtgtgagcttggctcactgcaacttctgcctcctggggtcaagtgattctcctgcctcagcctcccaagtggctgaaattacaggcacgtttagtagagatggggttttgctatgttggccaggctgatcttcaattccagacctcaagtgatgtgcccacctcagcctcacaaagtgctgggattacaggtgtgagcctccacacccatgtgccaggctatgttttaagtgctctacccatgagaactcacttagtcctcataacaatcctgtgaggtaggtactattgtttccccccattttacagggaaggactctgaagcacacagaggttaaggagtttatcaaggtcactgtagctaacaagcagcagaaccagattcaaacccggagcccacactcttaatcactatgttgcttctagaagaaagaaaataagggatgaaggatagtaaaaacatgcaagcccttctgagccccctgttgttggccccactttggcaggagtgttaggaagactatgggaactcaaaggtgacacttagcactctcctccagaggctacaggagccatcattggtagctagccatttgtatcccccgtgatggtggagaaaagcccacactgttgcaagtttccagaattttctctgctctggaaaagactcccaaactagggttaatcaagtatcttttttggtgaatttcattaaaattaccacataaaaaaagaagaatttgtcctgaattatacatataggagaaaaatgataaaataaaataatttccattatctttgtagcaaaaaaagttggaatgattccaccaggttctctgaaggactttgttttcaaaggagatgttaaaatgtgtaaaatatccaaaggatacacttttgcagctgaatttaggatcttaagaaacatggttttaccgtgtttcccaatgattgttgaaaagaagcagtgactgggttacatctagggcagggtttctcagcctcggcactattgacattttgggccgggtaattctttgttgtggggggctgtgctatgcattgcaggatgtttagcaggatccctggcttctacccactagatgccaataagattctccctttccatctgtgacaaccaaaaatgtctccaggaatttccaaatatcccctagggccaaaatcacccagttgaaaactagtgttctagggaaaaccattataattaatagcatgtctatgatctcccctgttgcgggaagtcagggaccccaaacggagggaccagctgaagccatggcagaagaacgtggattgtgaagatttcatggacatttattagttccccaaattaatacttctataatttcctatgcctgtcttcactgcaatctctaaacacaaattgtgaagatttcatggacacttatcacttccccaatcaatacccttgtgatttcctatacctgtctttactttaatctcttaatcctgtcatctcctaaactgaggaggatgtatgttgcctcaggaccctgtgataattgtgttaactgcacaaattgtagagcatgtgtgtttgaacaatatgaaatctgggcaccttgaaaaaagaacaggataacagcaattgttcaggtaataagagagataaccttaaactctgaccgccggtgagccagggggaacagagccatatttctcttctttcaaaagcaaatgggagaaatattgctgaattctttttctcagcaaggaacatccctgagaaagagaatatgcccctgagggtgggtctctgaaatggcccccttgggtgtggctgtcttctatggttgaaactgtagggatgaaataaaccccagtctcccatagcgctcccaggcttattaggaagaggaaattcctgcctaatatattttggtcagaccagttgctctcaaaccctgtctcctgataagatgttatcaaagacaatggtgcccaaaactttgttagcaattttaatttcgcccccgtcctgtggtcctgtgatttcgccctgcctccatttgccttgtgatattctattaccttgtgaagcgcgtgatctctgtgacccacacctattcgtacattccctccccttttgaaagtccctaataaaaacttgctggttttgcggcttgtggggcatcacggaacctaccaacatgtgatgtctcccccagacgcccagctttaaaatttctctcttttgaactctgtccctttatttctcaaactggctgacgcttagggaaaatagaaaagaacctatgtgactatcggggcaggttccccgatactccccaaagtattgcatggaatgccacatttcttttatcatagtgcttcaaataagtatttcagtgtgttactgaaaatatttataaacaaaatatatttgatagcagggtatgaatatgcccgtgtccttggaagagaaagaggggacaagagaacaggtataacagcatgttgttggtgaaaataaattggtagtaatatagattgaatatcccttatccaaaatgcttccgacaggaagggttttggatttcagatattttcagattttgaaatatttgcagaatacatacaggtagagcatccctaatccaaaaatccaaaatctgaaatgttccaatgagcatttcctttgagcatcatgatagcactcaaaaagctttggattttggagcatttccgatttcagaatttgggattagggatatttgacctatagtaatgccaaatactgcactaaaattagcaaatgtaatctcattgaattgtgacaacagccttaagaggaaacccgatcattatgcctacttagtagatgaggaaacagaggtaactaggtcaaggtcacacaacttggagtgtcagagtctggattctttctagttctgccctcgtccaagccagttctgttaacactattcttcctttcagcataatctgtgtcatcactggagcttatgtctacctgcctgccacccagcaccaactgtttaccctttaagtctcattctgcctcctccaggagccttccctgacccctgccttcaccttctgacctgtgccccttcacaccctgtgccctcttaactgggaaagccctgagggcaggggccataccttatttacctctatctccagctcactgcacagaggcattcagcagatgaccagtaaatatgggctgtctagtaaaaactttgcagttagagataatgaaagaaacataattacttctgtgtgggttgagaaagaagggaagggaaagtccagatacttaagcagaaaaaggcaaacagtccaaaaggggaaaagtaacttgcccaaatcatgcagttgagggcaggaagaaagggggacaaagccaaaaccaaaacccagtcccttgtcccagcccagtgctttgtctgctacgttacacaaactgtgattgtgaaattaaagggtttttgatggcactgatataagtaaataaatggctttatgagttaacacatgacaagcaataaactcataaaaggtaaatattgacaactgaagattatatatcactatgtttagtgtgtggagaacccaactaggaattaggaaagcttgcacattcagtctggtttcttggcaaatcaatgagacttcaaacaaatcattttatttctctgtgcttctgtttcttttggctgtagtattttgctggttaaagagcacgtgatcaatgtctatgcttttaaatgtctgtctttatttgagcatgctcagctggatgtggaaaacctatggttctcttgggtttcataaggatcaaatcccacagtgatatgtaaacttgtgtggtttatagaattataggacctcaaagctgggagaggcctgataaatcatatagtgaaaatttccagccagtgcctggatttcttttacagaatctttcttttattggacaggtgctcccttcacaatccatgatgtaaggagaaaaggggcttcgtttgaaggaagttagtgtattgtgtatgggcgtgtactttctgcttggggtgtgcctacagggctatctcactttctgaaagcgtaataataagttactttaccatgcattaattaaatgtcagagaccatgctaaatgctttacagagaatatcttttttaatctgtataagaacctcctgaggcagataatattattaaccttacttttcagataaggaaactaacattcagaaaagttaagtaacttgctaaagacatgtgtctactaggaggtagagtctcaagtctatttcaagctcctaataagtaaataaatgtctattgaatccaactaatgacatcccactccatattcccctgccactgatgagagagagaagtataaagtttatgtaaataagacagaagcaatgttttatataagcattgtggatttaattccactaagggattgatttttcatcttaatggaactttttcttcagctatcaagtttcagtttcaagatcgcaaatgctaagaagatattaaaatattttaatacataattccactagatcatatttataggtactgttaatatattaccaaatctactataaacaaaacaataaaacaaaaggctggatcaatatggaaagtagagtaataatttaggccctaaagaaaaactacgtaagacatttcttagaggattaccaggtttctctctctctctctttttaaacacagcctaaaatagaaaagcaatttatgtattaataaaaaaaatagaaacctgaggcagatgtaaccagaataggtgaattaactgaagactgatattcttatttatgtttgtgtattttaaataaagaaggagtttgaccatctcatctagttaatcattaaaaggaaactcgagccaaacttgtgaagcaggtaaagtttatttttagacattcaactggcttctcttttgggctccccttttcttttggggtcatcctccatgtctggtaaccttaacctccctgtctcttccagaaggagcaacacccccatgttttagacctttacttctgatgtcaggaccctttctgatgcaagtgttagctaactccagctggctgaagaggaaggaggaggaagagaaggagggggaataatgtattgaagtgtgtaatagtcaagtctaggagcagccctcaccttaggatctagacattcatattatataattgggaatctatttccagatctctttgctttttttttttgcaaacctcaatccaatggagtctctaagtggtagaccacagctgctccaagcttgcatcgtatcagcttagctattcctgttgagaaacaagacaagtttccaagtagtcccagaaagccaagaattaaggtgtatctgtccctgtcatgtgcctatctctgatattaccagacctggcccatgcagagttacagatgggttaataccaccataagcgcatggaccaaagttagggaaaggatagttttccaaaggaaatgttaggtcctagtatcatatgtggagaggggatacttggcaagtaaaacagtacctatctaccatgtggccacaacagggcagatcagggtccctggtaggatggaggcagccatcaagcattatggtatccctgaataatcccttcccagttcatatgtaaaccaatcctcttaaattgttaatgcatttaacataaggatggattcagcaaaactgtatcaatagcaaaacatgaggggtctccagctagtagcctgtcctgcatagccatccatgactactgctctaattgattttttctagaatgtctaaaggaagatgaaagtagaaaatgagctgtagtggacaagcatttttaaaatgagcccaataatgtagcacttttgggtgcttgataattgttgcaaatcacatttgcctgagaaatttcaattctataataattgtacaatagcagaaagatctagatacaaaaatattcattgcagcatggcttgcaatagtgaaaaattgaaaacaatttacatatacttcaataaggaaaggttaaaacaatggtatactatgctactattacctgaaaatattgaaaagatgaaaagatgtccaataacatttgatgaataaaggttgaaaaatacatgtagtaaaatctcatttttgtttttaaaaaacatatatgcatgcatgcatccatgtatagacaaaaaggatttgaaaatatacaataaattatagttaatcacatttaccttatggtactgcagaacatcagaactcattcctcttatctagctgtaattttgtaatcgttaactaatctctccccatcctccccttccccctgcccttcccagcctctgatagtcacaattctactttctatttcacataataaaagtttttaaagaggggaataatggggtgggggatctggaatatacataaaaactcaaaaataattacaaatttgttgccatcaaaatataaaaagaaaaaaatagttacatctgcaaaatgggattgtgtgaggaagtttttacctttatacatttctaccttctgtatgtttggatttttacaataagtatgtgttattttctagcatcttttgaagtttttttcttaaaggcataagtaatatctaaagttatttttcatccttctaatgccgtctacacaaagataacgatttttcttggatggccccaatctctcttctgtaagatctttccccatttgtcatatccataactcataacctcctcacccttcactgctctccattttctctataaagtgagcccagtcagtacttgtaggcttgttaagcattacttctaataagaaagactaacttgtaaagcaaatgtggaaatgtactaatatagcatcaagcacaaaatagccattcaataaccgaactatttaattccttttttttcacacttcatcctttccctaattccagaaagaacttgaactgggtcataacaaagacaaatttagacagacagataaagatatctcataggtagaaataaaactgagtgattataaactaatcacaggaggctctgttagtctgatgaacagaaacacacgtgataaaatcacagagaggtaaaatagaaaatgaaaatcaggatcaagaaaagggaaataaaaatatgctggacatcattcaataactatttgctgatggtaattatagggatggaaaacccatcaggcctatggagctaaaattaatcagcaagtattcacagagtgcctactgcttctattactggttctggcttcctgcctgcccagtgcagaggcttgagacatttgcgtgacattcagcttgtcaagacagaaggagcaaaataagcagacagaggctcactgcagccgcctatacccatcatattgttggaatcatattcaagtgagacaaactccttcagtggaagacgataaaactagcttaaaagttgtaaacatcacttcatcacccaaaaaaggcccaattaagtggagatactatttctgcaaagcaatcatcaattcatttgtgtaacatttgaaatttcaaagtacaaacccacattctattaaaggcaggaagtgaaaccaataaaacttgtaacaactatacttaattttcagggttctttccattgctgacaaacattttaagtcatgtctattctcttaaaatgtaaaatatgatgtttatgtcactgttaatattttgataaaaagctattgtcatggacatctgggtttttttctgcatgcccagaaatcccttttctcctatttaaatttaaaatctccaattatttggagaagcacctcctcttctctctctttcatttgtaccccattcttaggtgtcagtggtgggcacttgagctaggctttgcccatcatagtacacattcctgacatcccttggtcatagttattggtccagggataagcatttgaaccaactagaccagtgaaacccctcccaggaacaactactaaaattatgggaaaagaactctttccactgaagttactaacctggcaggatgtgttaaatccaggtgccacaggccaccaggtggagaggtggagataatctttccagaaaacaaaacaaaacaaaacaggaaaatgaagctaagggataaaatttaagccctttggacttcatttgagcccctgaatccagtcatgcctcctgaaattaaacttcccctggacttttcagtgaatcaaaaaactctgtttttaacagtggggtttcttataaatgcaccaaaaaatgacctaatgaatgttgtctacaagcttccattagaagtattatcttcaagagaaaaaaaaaacaaataacttgaagaaaacccttcataattcaagtcagtcctgctaacctctaggaaaccctccgtgaccaccatctccatatccacacccattttcctaaccttaaacaccagatgacttcttgaagcttatgaagtgccctatgcatctaacacatttctgtaagtctgcattgttctataatgacttgtaaccgtatctgtctccatttcctccagagaagagattgttatcattttgatatccctgcagccttatactggggcctaacatataatagttgctattttgttgaaggaattgtattttgttgaaggaattctcttttgttgaaggaatgaatggagagaatattaattaagaaagtctcttctattaataaacattccctgattgattgaaaccatgcctaaaatagctaatcatcagaagaccaaagtaaacaacatatccaaactgaatcctcaaagtgttagtcattggtagctgtatagctgagaatctttccttcttctggtcattagggttgaaagggtgggtgaatgtggagacatgattctttcttttgcaaaacatttactattttttaaactccataaaatgtaataacttctcttgaaaaatgttaaaacccaaacaaaaaaacctgtaatgtggaatatagattgtaggttataatggaggaagcagggaaagtggggaaaactgtggttgccagaagttttctgataactaataggcaagacaatagggtggcttttggtagggtccttctttatggcatagcaaagaaaaataggaatgaagaagtgagaagcatgaaaggggacagcaatatatgtgtaacacagggtgattcagtgtgagagttttataattaaaattgccaaatgtgagaaaaaaaaatctactataaattgggataggctcaaggcatggagatgaacaaataacccctccatgtgggcaaaaatcaatgaaattactagatgagtagcttagtatgtgagttccagttgcaacatgttactggtatttggggcttcccctcccccctccccccctgcactttgaggcaattcgacatttgactaacaatccagcctaactttctccatctgatataaagatatttaccttgaaatcctagaactgccaacatctcctacttcctactacaaccctccctgactccttttctctggcacagctttctatgcactcaccccattcaactaagcctgcttactcttcaccagaaggtcttctcttagcataaaaagttcctggaagtccatctctttcatagagctgctggatgactgctttgcttacctttggccttcaaaatacctctcctgtccaaccatagctccccagctcccctgccattgcaaccaatacaaacttcgtcatctttccttgggccaatgtgcctgtctcctcactgctctccctgctttctcccttagcccctacaactcatactccacatcgcaagcagaacgagcttttcaaatagtaaattagattatgtccattagtgtgttagtaaatgtttaacagctcctgaggggaacagagtatctatgtgttttataatttttacatatatgtatcacataatttacaaaaagcaagaaaaaatataacactcttaatagtaaattctatatggccatgtgattttcacagaaccatttcagtgatttttgcagaatatttgtgtccatagccaacctacagctaaaattcaaacacgtttggcaaaatcagaccacaaataaatatctgattaatatccaatcagcaaagaagtcattcatggtactgaagtcccaacatgaatgttggttgatatttttacattaatgagcgagataaaagtgaagcaacaaaaatggatgttggaactaaactcgttcattaatgacagaagtgacttcttttgctgataatagctttcaagtactagaaaaatatttcctcaagtttttgtgttcacaaactaaggcacttttaagttcaatcttcattattaaaatttcttctactctgtcagtctagacaatcaacaaaacaaatcaagctctggtttgtcatgtttcccaatttctatagtataggtactccaccatggttgatttcaaactaccaaaataacatttctgaatgcagcgttaggaagggatacgctgcatcataccatcgtatggtatgttcttatacagaacagacagaaataactttaagaacatagataatagtaaaatggagtaaaataattaggcagtaaagtcttcagcatttatttttgttgttaaaatatttgattgtgagtttataaataatttggtttttaataatgactgtgattaacaaccaacttacaaaatctctgaaaatttaacagtcagtgcttgcaagctggtacaattgtttccggtgcactactgaattatcactcccctgcctaaaattccagactgcccattgcactgattccctgggaaataagtgaaaagagacaatgataattttcatttttgttgtggtgaagtgatagtgcaaaaattccataagctcctctaagttttccaaataaagcttagtgtttaaaaacgtttgaacacatgatcccatgtaaggcctacattacttcctgtgtgataggtggggtagatatcattatccttcctttacagattgaaaaacaaggctgagaaaaatcaaatgcctaccccaggctcattcaagtaagtaaatggcagaatagggtctaaaaaccaggtcttgtattgaaaattcaacaagaggatagagaaaatttaattgacaaatactgatctcaaaacaatttttttttcaatggtgacaaatgtcctttgtagcactttggagtttgatatgaagtatcttcttatcttgttaagggatccctataccaagaatgttttcatctcaaccccactatttctaagttagcttaaaaacaaaacaaaaccctgtgtgctctaataagaagatataagaaccaaaatggaaatgcaggttctcaaatgagctgaaagattccacatagcagcggggcagattgaaacactctttaccaaaggaacatgggagagaaaaggagattaaatcaagaaaggaagaaagctaatgacatatgaggagccacaaatgccacaaatgaaaaaacaaagtacgtaatacttgttgcaattattcagtgtgcttgctctaatgcctccaaacattaaaaacattgagttcctgcttatggcaacatttatctcatttatctgctgatagctgcctcatccttgaatcaggtattgcttaaactaagttctgccagcataaagaataaagtcaaccaggacacccattgggcatttcacgcatatgagcacaaattgtgatattttaggttgcttatgatgaaatcattgaaagcatcatgaaagacagcaaaacagcaggaaagctagtaataatttagcatttcccagtccaggcgggaatgttaattctaattacaacgaggaataccaaagtggagttcattatgattaagaacttgctgtactagtgtgaattgtttataataggcatgtctggcataaaatacaaatattgaagcagacagagatggctcattcaaagctcagctgggttcccttgaacctcttaccttataaagttaaataggaatagaagtattttccaaagtcaagatattattttaaagagacaaataatagctatgatagctgcaggaataattttttaaagtaagttctaaccaccaataaaagctgtttgtgtgggcttaacatgttcaaaatacacaatacacatgtacacaatacacgtatacatggttcccatttatatttaacatcacacatttaaagtgagagagtacagaaaaaaagaataaatggaaactgaagccatgacaaagaatcacggactataggaaaataagtcacaaagaagtatgcttatgtaagaggaaatatatgtgataaacaacaggagacatgggaatgaatgtggtgtcttatgtcctttctttaacagaatcgtgtaacagacactactcaatatcgatctcaactgatccagttctccagtctccctggaaaacaatggattgatgcccagggtgcgctgaacactggaaccatggtcacttctgcacttcacacgattctgctcccaccagttgagctaccaacagttcctggtgcttttgcttcccaaacatgtttatgccatttgttgcttattactgtacttacttaatttgattaaatattaagtaaaatgatgaaatgagtgtaaaaaattgttctataaaatctaaatggaaagatgccctatagccttccttgacttacagttgcgtcaagtaaggtggatgtaagacaattttaaaagactggtgtgggggcaggagtgaggaatcataaaaatttagaaatctgcacgaaaattattctaaaagtacacattgaacatccctaacttgaaaatctgaattttgaagtgctccaaaatccaaaactttttgagcattgttatgataccacaaatgaaaaatcctacatggaagtacttaccacaaactttgcttcatgccccaaattattttaaatattgtataaaattatcttcaggctataaggtgtatatgaaacaaaaaatgaatttcctatttagacttgggtcccatggccgagatatctcattataatgcaaatattccaaaatcagaaaaaaaaaaatccaaaatctaaaacactttcagtattaagcatttcaggtcatggatactgaatgtgtatctttaatttcttgttctactttgtttaaaaaaaagggggaaaatagtaattctacagatgaataataattgctaatgatgagcaaatacttcctatgacccaggaattcgtctaagcacttcacatatatcaaactggtttaatctttataaatcagtactattattatccccattttacagatgatggaaaaaggcacagagagttagcctgcccaaggttacattccttttagtggtggagactgtatttggcctttatagtctggcttttaactgctacactatatcaatgcattacaggtatagtttatacacacactaaagaagacatggaactccagtcagtgggctcataaaagctttagaccttcatcaaaagattagaaaataaatgttcaatcacaggttttaggtttcaaaagtttcaaaagtttaaagtttgcaagttatctttcttaaaattatttccttcttttaactaatttttaaattaaactccagttcaatcacatccactagaaggcttcactttctacaaaggggtaggtaaaggtgatgatcttaaataccatactgggagttgggatctgtgtagcactagaatcaagagttattgtatatacttgagaaggagcacagcctgatttagttgatgttttggaggggtaatctggcagtacagcttggattattttagtgggaatggagatgacaaaacatgaagagaatgggagaactcacttgggtaatatatcagtttctgaaatcaatgtatcaagtggtttggttattagtcaggcttaaggttttattggccttaggacatagtctctaagaccatatattatcttcattcattcatttaaccaacacccactgagcaccaactatgcactagtgatacaggggtgaacaaacagacacagtccctgcctttgcagaacttatgttctggtgggtgatacagagaaataacaaatgagggcacaaataatgaactatcattgtaatgtgctaacaaagtatgcagaatactataagaacatacaatcaagaatctaatctagtttattttaaaaaaaagtggggggagcactcagatgtttaaacacaaaacaataaaaatgaggatcttgagggttatctgtacactttttattaacccatttggccacaacaataacccagtaaaagtgattttacatctagttaactagttgactcaatgttattataaccctgtaatgtatttgttgggtgcctgctatgtagtgggctgtgttccaggagtgggacataaagctatgacaagatagatcaggtccttgccttgactgagtctgaatacatcaccttcatttccacctctgcttctaagacaatcaaataccttcccactcagatagggattcatcctatttcttgtagtaattataagttcccagggttacagattagtaaatgccatacctaaagacttaggatactgtgcataaaacactttcaatagtgtctgtcagacagcagatgcgcaataaatgttgactttcgttagaattgtgttattattataatgctaaatctcacgtcctttctggcacactggagttcatctcttcaattaaattccgtaagcacatattgtaagtagtctatcagaattgatatactacttcatgttaatgattgagatcagtgaggaaaaccactttaatattgtctaattcctctcttaatgcataggagccatgtgaacttagacaagcatcaacctctgtaagcctgttgtcctcatattgaaaaatcgaataacaatacctatctcatttaattgttgtcagcaaaagtgggcagcagaagagtggggatcaataaatgttagccacaaatcataactatttgtattactctgaaaaagaggggttaacttatagttcatgcatgcttccaaatgaatgtgaaagactaaagaatgagaatttttttgctatcaaattaaaaaattaacaggcacatttagattgctgaagagagaaattaggataagtttttttttttttttgctcaattaaaaacgttttcaatggcatatttaaaactacgtattcttccccattaagatctgcagagaaaaaaaaatgaagggagaataattgggaactcttgtgaaatcataaattatttaagcagagtacctaccactaaggatttgagcatgtatgagcgatgaggtggattcttagagcagagattcagcagtgagacaggctaatggcatggggagatgtgttctattagacaactgtattgtccccttaattatatacatatatatgtatataatatatatgtgtatacatatgtatacatacatgtatatataaatagaattcttaatcattttaagcagtgtacaaggataattattagcatgggctatttaactcacttttaaaacgtgtaaaacattattgtagggttgggtcttgatttgtttcccatgaaactgttggtagtttaggggccaaattaacgaaagacatctcattctagtgcttgaggctcagaaattggaaaaacgggcaactaggtcaagcagtgttctcatagcctcacagatgagcatccaaagcaagggcctccttctagttgacttgtgccaagggacaggagaagcggagtctgccttctgggtccagaagggggttttgttaacatggagttgctcagcgcccttcataaaaattcttctggctgagggttctacgttggcatacggttggttccctcttcttttccgaggtggcgagtatctcttcctttgccaagatggcggctccagaatcctctggaggcggcccccgtagatcgtctccggacaagaggcttgctgaaagcctacttctttcctttcacatcagacaatgcacagggaaccgtttacccttgagaaccaaggaaggacggcttaggctacccgcgatcgcgaacctttgccaagatggtggccgcggggacgggctggcgacactgtaccctaccaagatggcggcgggcggcttccgggacgcgcttccccaatcgtcttcaagatgtcagagcagggggagccgccgtcagtctgagcgcggcgggaggtgagagagtggctgtggccgagcgcccgagcaggattaggtggagctgcggcagcccccgcccgtgtcaggagctggcaagcgatgtcacctgtgggggcgcaaaagttacctccccaaaccctaaacccacacagcacaacctttcccagagtcacaaaaatcataatctgtgccgcacaaggtaggaggctcggtcccggcatcgtccaagccttcccgacgcggcgagctggggaagggagctggggcgggggcttcccgcacgggcacccctcgccccacggccctctcctttctcaggacggaccacgagttcccttccccttggactgagggggaagctcctaacaggaacatctgtagggagttgaacgctggcattttaaagctgcctgtattttgttttatttgtaggggcaggggtcctatgaacgtgatagggtgagcaacgcacagagtcgagggcagcaaatgtcaagattcgggggtggggcctgcaccgggaacttggacgcgggccctggccggggtggaagaagaggtcaggagtttcggaaggggggctatatttcgccagcaacttactatttcgcctgcaacttgcttttaagcctgccgccccctgctttccttaatcataataataaaaaaaaagtgcaaagaaatccagctcgctggaggttttgcatttggcgtgcaacttccttcgagtgtgagcacattgggcgggaggggtgggggttgaacttggcaggcggcgcctccttctgccgccgccgccgcctcgcagactcggggaagagggtgggggacggtcggggcgcgggggagggtgggttctgctttgcaacttctctcccagtgcgagagcgcggcggcggcagctgaagacccggccgcccagatgatgcggtggtgggggacctgccggcacgcgactccccccgggcccaaagtacgtatgcgccgacccccgctatcccgtcccttccctgaagcctccccagagggcgtgtcaggccgcccggccccgagcgcggccgagacgctgcggcaccgtttccgtgcaaccccgtagcccctttcgaagtgacacacttcacgcaactcggcccggcggcggcggcgcgggccactcacgcagctcagccgcgggaggcgccccggctcttgtggcccgcccgctgtcacccgcaggggcactggcggcgcttgccgccaaggggcagagcgagctcccgagtgggtctggagccgcggagctgggcgggggcgggaaggaggtagcgagaaaagaaactggagaaactcggtggccctcttaacgccgccccagagagaccaggtcggcccccgccgctgccgccgccaccctttttcctggggagttgggggcggggggcgaagcgcggcgcaccgggcggggcggccacgccaggggacgcgggcgtgcaggcgccgtcggggccggggtggcggggcccgcgcggagggcgtgggggcagggaccgcgggcgcccctgcagttgccaagcgtcaccaacaggttgcatcgttccccgcggccgccgcgcggcccctcgggcggggagcggccgggggtggagtgggagcgcgtgtgtgcgagtgtgtgcgcgccgtggcgccgcctccacccgctccccgctcggtcccgctcgctcgcccaggccgggctgccctttcgcgtgtccgcgctctcttccctccgccgccgcctcctccattttgcgagctcgtgtctgtgacgggagcccgagtcaccgcctgcccgtcggggacggattctgtgggtggaaggagacgccgcagccggagcggccgaagcagctgggaccgggacggggcacgcgcgcccggaacctcgacccgcggagcccggcgcggggcggagggctggcttgtcagctgggcaatgggagactttcttaaataggggctctccccccacccatggagaaaggggcggctgtttacttcctttttttagaaaaaaaaaatatatttccctcctgctccttctgcgttcacaagctaagttgtttatctcggctgcggcgggaactgcggacggtggcgggcgagcggctcctctgccagaggtaagaagcgaggcgggagggggccggggcgcgctcgctcccccgaggtgccgctgggaccggagacaactcgggggccgccgcgggagcctacaaacttttattagcctcggggagtgggggtggggggctggcaagggccgggcgacggtgacgaaagggcagcgcgcgggtgacagcgctggcctcttcctctccctccgcaggcgtcccctggccgggccgagggggaggaacctgacctcggacggcgagcggagccctgtcgaactgccgggggcttcgagcctctcattcctcgcgggaatcctggcctcttttctccccctagtgtcccctttccctccaagggggtcgcccgacacccgttttcgtggtgaacgctaagccgcgtctgaattttactcgcccgaatatttgcacgccaccccggcgcgcccgagcgcgagcccgggctccggggaggccccggcggcgcctggcttgaggagggcgtgcggggcgcgtgagggtgcacacgcggggggctgacagcccgcaacttggagactgcggccggggccggcgttatctgttagaagtgggcgtgtcggagagagaactcaacaggtctggacgtacttctcttttaacctcgcacttttttctcttctccacccccgccccgcaagggcttgctctttagcgtttgttgttaattcgcgcctgaggtttctaagtggccccttttagaaaaagaccccctgtaaccgtaatggttttgtgctgcgatttttacaagtgctagtttgacgtttggggttgcagacttgataattgcaaccttgtaataccacttaagaccctctggcatggttcattagggccaattaatgtggctgggttatttgcaacttaaactgggggataatgtcgcttgagggagcgttttcgttttaggaaatattgttttggtttcgggtttgaaggcagctgtcaaaaaagcggcatggaaattcattgggctccattcgatacctcgtgtttagagatcgttatcgcctcagataaacggggcagagaggtggggagataagcagtttaccctcaagatttgtagtggcaagtccacacccctctctctaccttcatattcacttttcagtgagggccagtgacatttatgctgcctaacgtcatcgcataggaaaagttaccttttattggacgggatttgactatagtgtcccaaatgcgcttctccgtcttagcccatctcttaaaacaccctgattaacgatatactaacagtcttactctcttgagaataggctgagaattgggataggtgaaggtttggataggtgaaggcagagaaaattattttgaacattttactggatacagttgtacctgaatttatatgaatgtgattttacggttctgtgtttttccatttttcagtacttcgatatttgtttggaaaggaaagaacttagagatgtaatagcatttcatattgaggatctcaagcaatgtaaacaaatgtagcttaatctagatgtttttgtgagttatgataagggtcagctatatttaagttatgtaagctaacaacgtagtgagaaactactacaccttctcttctgctctttaaaatctaaattttagttggcctatataaagtgtatctcatttcatatatccaaaatttggaggtaggcacatccagtcagaagtatgggttaaaaagccttttcccagcctgtcggaagataagcagatcagcattgtttatttttcaaagaaaacgtgcatggttcaccagttggttgtactcaaaggtttggatgtgtgactagctggtaggagggaaatttggaagtaattagggattgagaattctagcatagtatttatcaaatgttatatgtattggttctcagaaaagcaaacagccgtgattgaaaagaggtaggaattttaatgatcacacttcctttttttgaaattaaatactttgacatcaacttgaaccttcagaataatcagatgtaatgaattataatgtctgtgattaacaaagctacacgttcagtgagcggcaggatgaatagccaagcttagttcgatacacttttgccctcagctgtgcaaatggattgcattgtacttttaaatgtggcatgctgaatgggagcaggggacatggctttttattctggaagatagaaactactcttctggtaacaaagaatttgattcggagttaactaaaaggttcatttaacaagctgcctcttactaatcggatcaggaagataatgtgactttagagcttatgatgttttccccccgtttttgttttttgttttgtagttgatattcactgatggactccaaagaatcattaactcctggtagagaagaaaaccccagcagtgtgcttgctcaggagaggggagatgtgatggacttctataaaaccctaagaggaggagctactgtgaaggtttctgcgtcttcaccctcactggctgtcgcttctcaatcagactccaagcagcgaagacttttggttgattttccaaaaggctcagtaagcaatgcgcagcagccagatctgtccaaagcagtttcactctcaatgggactgtatatgggagagacagaaacaaaagtgatgggaaatgacctgggattcccacagcagggccaaatcagcctttcctcgggggaaacagacttaaagcttttggaagaaagcattgcaaacctcaataggtcgaccagtgttccagagaaccccaagagttcagcatccactgctgtgtctgctgcccccacagagaaggagtttccaaaaactcactctgatgtatcttcagaacagcaacatttgaagggccagactggcaccaacggtggcaatgtgaaattgtataccacagaccaaagcacctttgacattttgcaggatttggagttttcttctgggtccccaggtaaagagacgaatgagagtccttggagatcagacctgttgatagatgaaaactgtttgctttctcctctggcgggagaagacgattcattccttttggaaggaaactcgaatgaggactgcaagcctctcattttaccggacactaaacccaaaattaaggataatggagatctggttttgtcaagccccagtaatgtaacactgccccaagtgaaaacagaaaaagaagatttcatcgaactctgcacccctggggtaattaagcaagagaaactgggcacagtttactgtcaggcaagctttcctggagcaaatataattggtaataaaatgtctgccatttctgttcatggtgtgagtacctctggaggacagatgtaccactatgacatgaatacagcatccctttctcaacagcaggatcagaagcctatttttaatgtcattccaccaattcccgttggttccgaaaattggaataggtgccaaggatctggagatgacaacttgacttctctggggactctgaacttccctggtcgaacagttttttctaatggctattcaaggtaagatcagtgtttttctgtttcttaagaatggtacatttaaggtagattaatagatgtaaatcttcattgatttatatgtgttctctaaagattcatgtgcttttttatatgaataagtttaagtggccttttgaaagtaggaaaggtagacaacctaagtgacatctgtacgtaaccatttcaggttttttccttaaatagtggttttcagtatcccattggccaacggtgaggattttatttaacatttttaaaataatgttgctcattaacagatatcttaacgaaaaattatataaattcaggagagtataatgtctcataatatcatattgtgttgtgcatggtcattcagctgttttagaatatgttcttatattacaataaatgatacccttacttacatagtcaaaagttgtgctgccttatttgtaaattcgttaagtgttagcttgagattaaagagttaaaagcagaagtactaacaaagagccctattcttcaaactgaatcttctgttaaagaatttgagttttgaagttgctaaagcaatgcagtgaacagtgtaccagaccatagtattagacacaggtcttgctcacagggttcttgccataaagtagacaagttatgtctgctgatcaatctctttaagagaggaattggtgtcaacatggtgcaaaacaaaattttacgttcaaatgttcctgcaagttctcaagtagataactgatggccaaaattgttaagcttcaattttcagctttcgtttgatttttctcttttttttactcagtcgtttataagcatactgatatttttgtctgacccaaaaaggtcagaaaatggaattatcagaaaaaagttctaaatgtagatatacgtgttggtaggggtgaatttctctaccccgtaacctcatccccaattcagataaatgctaggttttatatccattttagttgtgaaggaaaatataaaaatgtggattgtagtgacacaagattgattaatcagcgggtttttttaaaagaagacatggtagacagtgatttatttgtatgtaactattgaagttttttcttaaatgttagtgatattcatcgttcccattaactagttattcagatttttgaaaatcctttttctgtgaaagctatcctaacctggaggatgtctcttttctttcctctgtacttaagaagcttttcttgttagggaaataatttagaattagatttaggctatgttctgttcttctaaaaggcttagttgtcaaaaaaaaaaaaaaaaaaaccaaaaaaccttggttcttacatgtcttaatgtgaactacctcctaatctattgtttaaataattatcctttatttagaagaacactacttcaacctgagttgaaggtttaaaatcttttcagtaaggagatttgagatctttattattgcataagctgttgtgttttaaatgctaaaagacatgctgtgttttaaaattttcaattgcaaatttttggcaatagaattcgcatacttggttttcttaaaagagttaagtacggttgatttgactaagctatctgtaggaaactcttaaattgatttataaaacatgtaattatacaaagaaaaataaaacatcttaggaaactcttggggattattaatggattttgccctgataatcatcatggcatggttttcattttccttactataaagaaaaggcaagggacaaaacttattttccatttgctatgaacttttaaaccctataaaatctgggatatagagtataagtagatgaacatagttactcttaaatcactaaaggtgattttaatgctttaacttttatagtacttcatgacataaagtatctttacgtatttttaatttgggtcccataaccttatggaggtagtaggcaaggcaatgatgatgcggctctttagaagttctttaatatcaaatgaaattattatttttatgccaatctgtgattgggaaatataatcagtagtctgtgtcctaacaagaaggtataatactttatacagggtattttgttaatatttgaagattttataccttatggcattaacttagcactgggaactatgattacccaaaacaaagcttcatccaaataaattgaaacagtgtttcttttaaaccatcattgaattagtctattgtttccaaacaacagccctgatatagctaaaattagttgctttctcttctctatatgttacatgactgtagccaaacatttgctatgaccagtgaccctgagtgatcagcaaataatcaacacattgagaccacaacttgaatactgaccttctgactttacgaagaaaaatattaaatgccactaataacttgaattccttttaaattaaaaaaagttataaattgcaatttgactttttaaaatgccacctaaaattgtttttatcagaatacttaaaaaaaaatcctcactttattctctgggggtgggaagaggcaattccttccttccaccacaacattgaattatcacataaaattgtaaaattatgaatattatgattgagcttagtaaagcattttctaagttcatttatagtaaaacaagagaaaccttattctcaaaatctattctttaagtaaaacaaactagtcattctaacttaatatgcttttaaaaatactgaagttcagtacatttagcataaacttattgacgaaggcacatttctgcattatttgattttcagccttgtttcatttaagcattaatgacagaggtagagaacagaaatggttttaggtggtattagagcttttattgggattatgttgaaattttagtgttaaaaaattgttcgtatcctgaagggagggattattggagagaatgaatgatgtaggatgaacttgtaaattcagttttcggcagagtctaaaattaagtgatgattggcacttaatgaagctactaaaatttatgtagattttaatgtctcattagtaatcgcatctgtatctggttttataaaagtaatgaaattgaagacctgtacaaatacagaatgaatgaagcaaattctgctaacatcatgttgaatgttttctcagaaaaagaggaaatacgaagagaagagatttgttttgactgtgatttaccctcacccccatggatactttctttacttcctaccttttttctttttcttttccttctaaagattctggcaatgggtgtttcagtgttttttaagcttaatatttctggtactcatttatgtaaagtgatttctgaatgttaaaggagatttctttttaaatatattttcacttatttttagctttatgatgagaatcttattttttaaatctgtaacttgttatggctacatgattagtaaaaaaagtttttaaaacacactgtgtattcaggtgtgtcattttagtgtgaaatgactaatgcagaaatatgtgactagcatgtggtcagattttattgaaattacttacgatgtttctatggctagtccccttgtatttttataattggtaacataattcatatgttattttggtcttgtctatttgtgttacatgtattttagtctgaccacttttgctacttatttaatgtttatacattttatgaaagacttattctgaaatataccttgcataaatgtaggttaaatgcaaattgtattaatagtgaaatggatatgtgggtagagatcactttaggggccttttgagatttagtgaaggaaagattggatcaaaagggtttactttaatgtgactgcctaatgtgaaagtcggaacatctgcattaattggttagttacataaatcttagtctactctggcctgcaggtgactgaaacagcccaggaaatcttaatttacattaagcttagacaaggtctgaggcttaggcttagttcttaaagcacattcttttttactttaatgattattcctaattttaatgagcagtgggttctcattgtgtactagtacttaggtgggcaaattaaataagcaaaataggtttgtgctgaatagcatttacccttctgaggacatcctggtaatattttcatcaagagtaattgtgtaatgcaatatttacaggtatttgccagattaatgggcacttgttttcatatttctgagtcatggaaaatatacattgatgattcctgttgcataaagagttttcaagaaaattttgttgaattaagctataactacaaaaaaaaatccattacatattgacctttagaaaggatttttaaaagcccatgctgtccttatttctgcagcttcagagagccgactgctcttattttcttctggcatattctattaatacttgggttttgtatttttcaagtaaataaaatattcctattgagaatttcaattttaaaaaagaaaaggtctactaagtgttcctttccctgttgaattatgtgtgatcatttctatgctaaactagattagggtgtgacttgtgatggtgatttttgttcattttacatattaagaaagaaatagaattttattgcagttcaaaattatttgtagacagtggttttaacccccagacacctaattgtgacaggttgctttccttagtgctcaatactgttgtaaatgtctctaaatacagaatttccagtggagttcatgaattaattgggggtggagggtgaagagggaggagcaacagagatgtgggatgctatagataagtttaggaatatccagatcagttctgaaaactaacagtttggatcaactgtcatgaattagaggtttaagaaaagaaaaatttaggactataggtacaagggaatgcatcaatcagaattacaatttaatttcttttatttcaggtagaaatctaaaactgaccatggctatataatactaatttttgagttatgttgtttcttactatgctttattatcaaaaaaggataaaatgcacattttacttgaagattattttagctaagattaagttcatatttttctcatttttatttaagctgctgtttaataaatgaaaatctaatgacttgaatgtagtcgacctaatgtcttaatgttgatataatcatttcatatatcatagtgcccttttacagccattgtcaactgactggagagcaacccttttctttggtaatatatttctatgggttatgtatttttctgctggaatattgagaaaattaatttttcataatatgcagaataaattatggggttctgcaagtgctagacagtcacttaaaccatttatattgcaatacattccttaaattcagtattttgaatgaaagtgtgttatccccgaattttatcacttgtccaatttaaatattaattacatcccaatagagctgcatgcttaaacatgctttttcagagtaacccaagtattaatttcgagtgcttttaaatattttttctttttagcaagtttcaacaacattaatcctgtctataatgcagcaagttcagtgaaagtacctgttgttttataatttttttttcattctcactgtagggcaccaaaaatatatataaggggaaaaaagttttaatgatatgattagttgtaaatgtttacgcattatcttaccttgaatttttatttttgtaactaataatttgagagttcaataagtatgcagtgtttaagacatagtttgttgcaaaaagtgttaacttactatttctttttacaataaaattagcctttattctagttgatttcataactgtccataatatttagctgtggctattatgaaagtatatttgatagccaaattttgaaagctattatgaaatgatacaattcactacatgatttattatttcatgctggttggggcagtgctgtgacttatgaccttatgattgtcacatgctgaacactaaagctctaccagtttgttatggacactgttttactttatgttatcgttttaatgttttcttttataattattgaggataagagcttccttaattttaagactatttaaattgcagattttgcttttttatttttttaaccatcccttccaaagaatttgatttagatattcagtagtagaaacagaagaaaaatactcaactaaaagtccaaagacctagtttctaatgctaagggagacagtccatggcctccaactaggtactttggagtcaaaaatactttctttacaactgtgtttgaattgttttcaaaacacctgtgtgtgtgtttctaaaattccacaatccttttaacccgtcaatttgatgagggaagtaattagggtagggaatggtataacaaagttggttctttgacattttctttatagattatcgaatgtaagacaaatagatgtgaatgcagatttggtgtttttataagataaggatttaaaataatgtagttggtgatatataaaaataaactattgctgctgttagcacccgagaggtggggctcttgggttctcagagcttgttttctatgttcgttacagttattttagattagaacttaaaagaacttgagagtttccctaattctaccccctaattttttcgaatgagaaattgagatccatagaaagtgttgaggtaaagatcacaaaacacttaatgagcggtgttgccagtttgaatatctcaattcttagttatctaagttccctggtaggcttctttaattatctgggtctcttctagacatctggaacaaatagttgattgacataatacagactagccacatattttataagagttacttttgactcatttagatttttaaaatatacagtgtctgtattcttctctattcattttgttaatttttttttacctaataatgattaagcaccaattatgtgacagcactatgctaagcactttgcatgcattcatctcatttaaatctcaactctgtgaaagtttttattctagttactgtattaagtctcaattctgtcaatatccatgaagcacagaaggcagctgttatttaccttaattttacagatgtgaaaactaaaggcatttaaagagaaaaagaaaaaaaaaaccaggaaaccttaacacttatctgaagggaaatatttaatattgggtatgttagttcctcatgtatctttaataatttttgtcaacagcgaatctttaaataaaatataaaggatcaggcctctgctctcctgcatatatttgtaaagtcacttactgctttttgtcacagtttcaatttctgtaaaatagtgagagggtttttacctgacaggatttgtgcatgtacgtttactttgaaaattaaaaagcattaggccaggcgcggtggctcacgcctgtaatcccagcactttgggaggccgaggcgggcagatcatgaggtcaggagattgagaccatcctggctaacacggtgaaaccctgtctctactaaaaatacagaaaattagccgggcatggtggctggtgcctgtagtcccagctactcgggagcctgaggcaggagaatggtgtgaacctgggaggcggagcttgcagtgagccgaggttgcaccactgcactccagcctgggcgacagagcgagtctccgtctcaaaaaaaagaaaaaaaaaagaaaagaaaattaaaaagcattataaaaatgcaaggtggaatttttaaagctctgccaagtccacttagcttaaaccagcatgactctcattggctaagtacgttatgacatctgtgactgtggtgtaggtattgcctataatcaagaatcttttagggtctgctatgtgcaatccctgaagggtcatggatcgcagtttcataaagactgctgtattttaaagccttcaaatgccaacgtagtatcttcacaatgattttttttttcagttttattattttttgaaagcgccttcgacaaagttttcagtggattttgttgagggatattaagtatgccatctacataatagccatagtgataactccaaccacattgttatatttttattaataaatgctagagtattctctttctggtatttcctattctgatatttttatataatcaagtatgcaaagattctttgtcattggaaaccttaatttgcctgaaaatgggaatgaaattttcaggtttaaaatttttttacatttattacatttattgaagctgtctgaaaaagctcttgagtatattgaataccaaaatttatcctaactgcataaagttgggaggattgtgaaacttgactgcactgacttgttttctttattgatcaaatggttgaaaaaaacttcagttaaacaaatttgatctattaaaccaaagttataaaagcagaggaaagcatagaattattaaacggcagtttaaattggtaaacataccgatgtagaacctaagtttgtaggcagctttcttagatggaaacttaaaaaaattttaatcagaacattatgtgaaatttgtcatctggaattcagctgggtttattaaggacaaagtgtatggctataaaatagattgagttttttttttaaaacagaaaacccaaaataaatgttctaagtttccaccttaggaggctatgtatattgctcctctttgaaactgccttcagaaccaccttgtaagccataaaagaaaatcggactcattgcactatagtaacacctaactgttcttgctcaaagaaaatgtatttatcccttagctttatttgtgtgactccaaatcatatgagtattgccagatatttagaaatttaatcctctctcgaatgataacatttattttctttgagggtttttaaaagagcccacatagatatttctacagaaaatgtttaattctgttttgaatatgcctggaataagtgaatagcttcccagggtgactattctgaaatgggtgatgcttagtggttaagttctgatttgtgttttcttgaagttattaaggaactttatgataacagtttatatattccctcttcttggcatagtaatgaagtaatagagactattcacctctaagcctgattttttaaataagtgtttattttatgtttaagtaaggtaggtctgcttttggcttggacttgaatttggcaatagcagatataaagtaaacataatgtgaattcctacaacagtctcccaaacagtttaatttctcattcatacacatttcccttagtgtatcagggaattaagtatctgattatcagtatagcaagaacaactcaagtatactgaagttatttatactcataaaatagtttgagttatagctacaatataaaattaatatatttttgacttttattcctcacaacctgaaaaaaacctctgcgattactgatagtacttttaaaaactaaatgaattttgttactactatttgctaaatttagtcatgtttactgttcaaaaaatgctaggttaaaatggatcctaatctttgaaatgatgaagacatgtgtagtggtgtcaaaaataggatattcattttgtaactattctgttagtgccgaagttcttagaatttctttgtgacaacagcctgcttaagaactttagattttttagaattgtactaaaagcaaactgttttcttggatatttgttctttctccccaaaagatgatttataagttttcagagctaagaaatgggaaggaagagccatcctagcatggcaggtaatgttttactgctaacaggttttctctgcactgctttatttgccttgaacctcttactttgttctgtcagctgggaggctggtagattttctattaggtagcaaatgcttctcatcactaaacacatatcatgggctggtgttagtgcagtctgtggatgggcactacatttttaatcaagaaatgtttttaaaggaaagacaaattggtgaagtaatttctaattcagtattttagggatgagtgaccttttaattgataatgatatttaacagagctgtacagtgctttgggggtcccacagacatgtttaaacaagaaaacagtaaataaggaagccagaaggaaaagttataaaactattaagaaagaaaatgaaaattctaaacttcaattctggtgcctggctaaatttgatttttgtatgcctcagtgtttctctatggacactgggaaatcaataagcaacctagctacgttattatgttcgtaagtggaagaactaaagaactacaaagacatgttctaggccaagaattctggtggtaggtagagtgggaggttaactagatgatctccaaggtccttctaattgcacttggcagcagcaagcatttatcaagctagacactgggcatatggagatgaagaagatgaatatccccagcagcatggagagcactctgatgatagtcatccctgcctccccctccctcagtttgctttttgaaatgtgagcttgaaagatctcaaactccttcctgggaagacataactgaaacttcatggaggaaagtgcatgaatgaatgggaaacaagatttgattcaactatttggaataagaaaaggggcaacaaggagtctgaaacaaatgaaagaaaagatggaaagaattagttgactagatgaggactgagtacataggaatgagccaacaggagacttcagcaactaatggatgaaagtattatgtgcatgcatgttgtcatcaaatatcacatgatacaagacaaggagaaaacatgactttcaccataacctcagtttgtgtaccctagttgcaagatatttttttcttctagtcacttaagaatatccttattgtctaggagaaataatcctctttctgggctccccagtgtataagcccaaatctgaggaaaatttacctgaaatgttctttccccagatacccacatggtttactctctcatttaaatgtcagctctgtaaaagagatctctgactgctctatctgaaatagtagaatctttcacagtctttccttcttcttgacatcatctatttgtgtcttatctgctcacctgctacaatgtaagctccatgagagcagtgatactgtctgccttgcttactcctgtatgccagcgtctagaatagtgtctagcacatagtaagacctctacaaatacatgttgaatacctaaataaacaaaatttaacatataaaccaaaaagatatataggaatggattatatttctaatctttctcgagtgaggaaaatgtcagcagatagtgaatatcactgagagagagatgatagcccaggttatcttccccagatagaaataagccttaagactgacaggtgtatatgaatacagagagtatacataaagaagatgtattttcaattgacagtctctaaatttgctttaagacttcgaaatggattgcttttcataatttcttagaataactctggtctgtttaccattgaaaaattagagtagccaatgtttgtaaatgaagggttagagggttttttcctttggtggtttgttaaaagcttgctcaaggcagtaacatagtaaattgtcaatataggaacttttgtagcagaagctttatgcttttcacttttataagaattgagattatttaagcagatgagtctaatgtatatgtttgtactgacttacctagaaggtcaggcaagaaatcggtttcctcatttttcagataagtgtgtgtgtaatcactgagtaccttaagagaggaggggtgttttatttttgcctgaattttcaaaatatctttcttcagcttatttatattttagatttgacttattctgtctatagtatataacagtcaggaggttggtaggataagttcatctcttctactaagagttataggagagttcaacctaatatggcaatgacagtcgcagaaaagagaaaatgcaagttaagtaggtgttagccatagcaagaaaatcagatgaggtcatttaagaatgaactgctctaatgttcaggaaaaaagaggggagggacaaggacagggctctagaaggcaaccaaagagagcagccacaaaataaatgaatagctgaagaattaggagacaacaatcttaaaatgtggcagggagagggtagttgtcacattaactagcatagaagagacagaatagaataacataaatatatgagtgattattgttcttgaaaccagtctttaaaacatgggaacattcccaaaaatcaaagccagataaattagggaaatcttaaatggcacaatataactagtgatttcgtttataatttttttaaaaaggagacttaaatttgaaatttagatgtaattaaagcagataataagaaacatacttctgagaccacaaagaccctgagattcagttaagagtaaggtagaaaggctggaagccagaagggaattaagtttctgttccctgagaagccaacacaacaggaaaaaactggccacaccctagttcaaactcttattactcttatcaatagtctcctaattgtttctctagttttctcctctcccttcttaattcattctgcagtctactgccagattaatcttcctagaacaccactttcagtattattcccctgatcaaaaaatgtctgtggttttgttgctcatagcatagtggttctccttctttgtaccacagcccatatgcacgatgatagatggtgggtagccacatgaactctccataacctttggaggatttgggttatacacagtctgttatccaagaaagcatatctgagtgtaagtgagcattatagggatagtcttataattgactccttttaaaatttgttcttctttttgcaaatgccccttcagaatttacagaaatagtgtgttcattccatcagtaaaattataccccaaaatgttaataagcttatttccatcacgtctcctttcctatttctttctttcctctttcttcctgcacatctccccttatcctccacatttctctgtaattacataagcataaacagacacatatgagattttctgggttgcttgcctttaaataaaagaatgggattatcttatacccctttgtctgcagcttgcttttctcacctaacaagtacaccctgaacatccttccaggttaacagatgcggatcccattcttttaaatagacaatattctattcatgtggtttcgtgatttttgccactacaagcaagtttctaataaacacccttttctatgtaccctttacaaatagcaactttttttctaaatataaatgctatggtttggctctgtatccccacccaaatctcatcttgaattataatcctcacatatcaggggaggggcctggtgaaaggtgattgaatcctggaggcagacttctcctctgctgttctcatgatagtgagttctcatgagatctggttgcttgaaaatgtatggcacttccctcttcactcactgtctctcctgctctgccatgtgaaaacatggtttctttgccttccactgtgagtgtaagtttcctgaggcctcccagtaatgcttcctgttaagcctgtggaactatgagtcagttgaacctcttttctttgtaagttacccagtctcagttagttctttatagcactgtgaaaatggactagtacagaaacttggtaccaggacagtggggcattgctataaagatacatgaaaatgcggaagcaactttgtaactggataatgggcagaggttgcaacagtttggaggactcagaagaagacaggaagatgagggaatgtttggaacttcctagagacatgttgaatggttttgaccaaaatgctgatagttatatggacaataaagtccaggctgaggtggtctcaggtggagatgaggcacttattgggaactggagcaaagttcacttttgctttgctttagcaaatagactgacagcattttgcccctgccctagagatctgtggatctttgaacttgagagagatgatttagagttcgtggcagaagaaatttctaagtagcaaagcattcaatatgtggcctggctgctcctaacaacatacagtcatatgtgttcacaaagagatggtctgaagttggaacttaggtttaaaagagaagcagagcataaaagtttggaaaatttgcagcctgaccttgtggtagaaaagaaaaacctattttctggggagcaattcaagtgagctgcagaaatatgcatagatgaagagtagcctaatgttaatagccagtagaatagggaaaatgtttccagggcatgtcagagaccttcatggcagcccttcctatcacaggcctggaggtctaggaggaaaaaatggtttcgtgggccaggcccagggttgcgctgctctctgcagcctcaggacatggtgccctgcatcccagctgctctagctccagctgtggctaaaaggggccaggagataatcttgggctgttgcttcagagggggtaagcctcaaaccttggcagccttcatgtggtgttgggcctatgggtgtgcagaaggcaagagttgaggcttgaaagcctctgccttgatttcaggatgtatggaaatgcctggatgtccatgcattctgcaggggcagagccctcatggagatcctctgctagggcagtgcagaggagatacatggggttagagcccccacacagagaccccactggggcactgcctagtggagccgtgagaagagggataccatcctccagactccagagtggtagatccactgacagctttcaccatgtgcctggaaaagctgtaggcactcaatgctagcctgtgaaagcagctgcagggtctgtacccagcagagccaccagggcagagctgtccaaggccttgggagctcaccccttgtgtcagcgtggcttggacatgagacgtggagtcaaaggagatcattttggatttttaagatttaatgactgtcctgcaggtttttggacatgcatggggcctgtagcctctttgtcttaaccaatttctctagtttggaatgggggaatttacccaatgcctgtatcccaattttttcttggaagtaactagtttttgattttacagtctcataagcagagtggacttgccttgacccaagaagactttgtacttggacttttgagttaatgctggaaggagttaagacttccggggactattgagaatgcaagattgtgttttgaaatgtaagaacatgagatttaggaggggccgggggcagaataatatggcttggctgtgtgtccccacccaaatctcaatcacttgtaatccccacatgtcaggggaggggcctagtgggaggtgactgaatcacaagggtggacttccctcttgttgttctcatgatcgtgagttctcatgagacctggttgtttgaaagtgtgtggcacttcccccttctctctctgtctcctcctctgccatgtgaacatgtgcttgcttctccttcaacttccaccaggattctaagtttcctgaggcctctcagtcatgcttcctttgaagcctgtggaactgtaagtcaattaagtctctgttcttcataaattatccagacacaggtagttctttattgcagtgtgaaaacggaataatacaatagatttccccaaagttgggttcctgagtcaggggtatgtgtatttaaaattttaacagatatttccaaattacttttttcgaggattatggcaagtcacagttccccctggcagtgtttatacttttctttataataaaaatacataaatcattattactaacaaattccttgccatgagtcctaaattgataacaacataccagtgtgccatataacatagctgaggactgttgcagtctagaattcaggctccttctctctgcttttaacaatatgtgtaatgttcaagaccaatttagtgccacttattttgtatgctttcctttatgtagtccaggccatagccccccacctcatctgatggtatcctctggcagccacagaccacacagttctttctacctaaattagtcattagcacatagtaggtacccagtaaatgtttgttgaattaatactgtttatatatttctaatttatctccaagtaaatccagtctccttaaggacaaggaacgttttcactataacacctagcacttaaggtactcaatttaggtagggctgtttgaacaaagaaccacagaggaagcaaatagcatggccttgcctttaatacatatattttactttctcttagggaaaactggaactgtaagaatctagtaacaataataagaacagcacttttattgagcagttactatatgtgaggcacagttcaaactgcagaggatacaacagtggacaaagctttagttgtttctgcctttctgaagcttatggtttatgggtgttacattcaagacatttgtaggacacattctaaaatgccatccaatttcaggctctttccagcagaaactgtggaatatttttccgttcattcagcatttacttagtgcctgctctgccaggaattgaagagaaagcccaaagacaggcagaccttacctgagaggtagtgaactgaccaggatgactgtgggcagtagacttgtttcccaaactagcctcaccatttctgtatttgcatatacgaggaaaggattagatatagggattcatgtcagcatacaccccagggacatttgtttttagtgaaaggtgccagtcttcatccctgtacccagtacacaaaccacgaagaagtatgctcccgtcattgtcaaagaatcatagaattccaaatggagctagttttgatatccagatctcacttcatatgaggaaactaggtccagtattgtgagtaagaattaggactcttcagattccctgggtatgaatctgactaacaactgtgtgaacttgaccaaattcataaccctgtaaactctgtttcctcacttttaaaatgggcacaacaaagtgatgcatgtaaactgcatagcacagtgtctggcacttaaaaagcactcctgaagttatttttagtgatgtgttttaagattagacaactccttaatgccaaaggtttttacttgagaactctgtctgttgtgccatactacacgctgttcataagataagcctttttcattaattgatctcaaactggcttcattatgatcttaactttatttcagttttatttttaaaatttatttttaatttttatgggtatatagtaggcatatatatttatggggtacaggtcatgttttaatgcaagcatgcaattgtgggggtgatatataattgactggggtgagatatctcattgtagttttgatttgcatttctctgatgattaaggatgttgaacatttcttcatacacctgttggccatttgtatgtcttttgagaaatgtctattcagatcttttgtccattttttaagttggattgtttgattttttcctgttgtctgaactctttatatattctagttattaatcccttctcagatgggtagcttgcaaatattttcttccattttgtgggttgcttctttgttgtttccgttgctgtgcagaagttttttagcttgatgtgatcccatttgtccatttttgcattggttgcctgtgcatttgaggtattactaaagaaatctttgcccataccagtgtcctggagagcttcccaaatgttttcttttagtatcctagtttcaggtcttagatttagggctttagtccatttttatttgatttttatatgtggtgagagataggggtctagtttcattctgcctatggatatccagttttcccagcaccatttattgaagagactgtcctttccctagtgtatgttcttggcacctttgctgaaaatgagttcactgtaggtgtatgaatttgtttctgggttctctaggtctgtgtatctgtttttatgctagaactatgttgtttgggttattatagttttgtagcataatttgaagtcagataatgtaattcctccagttttattttttttgttcaggatggctttggctattccggggcttttgtggttccatataaatcctatgattttttttttctatttctgtgaagaatgtcattgatatttattaataaagattgcattgaatctgtagattgctttgggtagtatggacattttaacaatattgattcttccaatccatgagcatggactatctttctttttttgtgtgtcctcttcaatatttttcctcagtgttttattgttttcattgtagagctctttcacttctttcgttgagtttattcctaggtgttttattttatctgtagctattgtaaatgagattactttctgatttcttttttagattgtcctctgttggcatctagaaatgccacagatttttgtatgttgattttgtatcctgtaactgtactgaatttatctgttctaatatttttttggtggagtctttaggcttttccaataagatcatacagtctgcaaacaagaataatttgacttcttccattccattttggattccctttatatctttctcttgtctgattactctaggtaggtcttccagtacttccagttgaataacagtgggcactcttgtcttgttgtagatcttagaagaaaggctttcagtttttccccattcagtatgatactagctgtcagtttgttgcagatggcataactttcaaactaattgattatagttaggaagtggatactttaacttgtggtaccattatcagatttatatttcggccataagcttgaagaggagctgaaaaatgcatatgtgatgcatatgcttcctatttggctctcttctcccacccccctgccctataatccacacaagttcctctctcagtcactcatcaactacttgaacctctgaggaacttggggttaaggtaaattagaataaaactgtctgaagaagagcaagcctttcatgtcttgagaaattcttggggttttagaaataacttcattgctttttttctccagttactttggcttcttcttaaagagaatactaacactttgaacgtcataatactaaggttctgcctcttcaaataaagactttaaaaaaaaatggtttttgtatgattcagtgtgaattaaatcccacagtgtaaaggactttactttcttaatgtagattttcaaatacacaattactgatgtttataagtagatttattacaccaaagcacctagcaaattcttgaatggatcaggtcttatttttcagtcttactttgcaaatttaagtcaaataattaaggatttgttaaatatttgtcttaatatcaagcttttgcatatcggggccctcttttataagctttataagcaatcttttgttttctctgcttgctcaaagtagctatgtttgttgtatctgttagtatttgctctataacaaacatactgggtgccttcccacttagatttggcaattatcactcctgtaaatgagatattacataagataggaaaaagaacagtatctttccaagaagaatagtatccttccatattaacagtttagagctgactgcttttaaaatttagtggctttaaaataacaaccatttattattcttcatgagtctacaaatgaggtgggcagttctgctgatctggccaagctgaacttatctcagctgggcacattcagcgtatctgctgtcagttggctggttggctgtagcaatgaatggtgaaagtaggctgcccttaactttttcacacagtagcattagagttacaaaagaaccagcagaaccatgcaaaactctttaagacctaggcttggaacaactatatttctaccacattctattggtcaaagcaaatcacggggctagtctagattcaagtgggtggaggagctgcaattacactgcaaaggagtgtgactgtagggagaggtgtttttttatttttatttttttgcgatttgtcacagtagttgtaggaatcaggtgtatttaaaattctgatccttctgtgatatccgaattgttcatgaaccttgcctctggtggaaaggcagaatcattgtgacagaaggataaaatcttggaatttagagactaacaaaggttcagattccagctccatcacttatttctgcaatcctgcagaagttaatcttcctgataggcattcagtaatgattgattcacctgaacctcagattctttatgtattttaaagaaagggctaggtaaatgcaaagcacttatgtaactgcttttattattgcaaacctggctcccacactccattcaaggtgtaagactcagtgtcttccttgaattaaaaaggaagagaaagtgtgttagggaaaggaagagaaatatttgactaattgtggccccaataaagtgaccactcactgggggtattttcctgtaagaaaagaatggttgaggctcagagttaagagatacaaatccaaaagtctccttggggtaggattccctgtgattcatgggttgagaggtgtaacattagacacagtcccagtctagattttttttttaaagaattgtagtccatcctatacacactgggtgccttaatactatatgtggcaattatcactcctataaatcaggttttacataagataggaaaaagaacagtatcattccacattaacaattgaaagatgactgcttttaaaaaattaaaagggccatatagaaataaaatcacataaatttcttgtgttaaacatagttgtcatattggatgaggactaaacacctaaattcatccaactagtagtaatagaaaagatgaaacacacacacagtaaaactagattaatttaatttatacaaagggccagatatctcagaattcagacagtcagagatgttgactagagttaatgcctcttttaggagaggtaccaggtaagtgttctcaaagaactggaaactgagaccaccacctctggcattatctatttgtgaacacaagcaagtctgaatttttccgcaccatagctacctttcatgtaagcttcttttcttagaagaaaagaaggtaacatttgggtgtaattttttattaagggtgaaatttagtgtagagagtaaaggcatttggcatagaagcccttagttttttttgtttttaagttgaactgccagcctttatggattgcagtcttcgctgttttgattgacatttcccaattcattttgtattatttatttttttaagagacagggtctcactctgttacccaggctggagtgcaatggggcaaacttggatcactgcagccttgaactcctgggctcaagcaatcctcccacctcagcctcccaagtagcttggactataggtgtgcaccaccatccttggctaattttttaaatcttttgtagagacagggtagtgctctgttgcccaggctggtctcacattcctggcctcagttgatgctctggtctcagccttccaaaatgctgggattacaagtgtgagccactgcacctggcccccaatttcatcctttacaaagactactttcaaccataaatcaacggaaacttcagctccctcagacatatttgggatccaaggatattttcccaaatgattaatgctaatttcatatcaatacatttttgcaaaacctacaaaaatggactagtaaagaaagactcttaatttgggaaagacagttacttggagagaagagaaacttaagaggcaggtcgagttcagtgttcagaaatgagaggatcataaagagatagccataaaaatgtttctccctatattgcctgctgatagggtgtatcagtgaaggtcttactaaggaccttgtaccttttcagcgctgcactgcgtgctcatagggaggaaagataaatcatgtgttttttctgacctcaaaggagcctgtatctggctagagagacatgatgcagacacatgaaataattaagaaacaattaactgtagcaggtgctgaagaatataccaggaggtcagagaatggtagagctagtgtgggcgaaggtatagcccagagcatcatcagatgattcttccttatgcaaattcacatctcctctgggtcaagtatcatcctggcatgcagcagctccataggtaatgccctaaggctagcctgaggcaagttgcaaaagccatcatattgagtcatggcctttttttgtgtggggggaggggaatggcatccccttcctgtctgccaaatcaaggaatacagtgccctcctaaacctgctttgttttagtggattgttaaaaagaagtgaatgaatttatgcttcattagggaaaggttacagtggaatactgaggagtaaggggtatttctatttaacaaatgacataacttgaaggaatgaaatcataaggatggaatttcaggcattaataaaaagctgatgagagatactttgagacaaaagagccttcccagtgtaaccgagatcacagcacctacttcacatacacaggaaaccagtcctatctgtctctcccatagagcagtagctgccttgtttttcctccctcctccatcattcattctaaatctccagtcctccaccgcaccttatccaaaccctgatacccttaagtcacagatggtgaatcagtcaaaagtagtattaaaaactagtggtacacagctacacctggaatgcagtaagaaaaatacggatttctgtacatcatcttccctccctgctcttacccccatttaagagttacagggtcagaacccaagagtctgagtttttgaaagtccctaaaaattttggatgatcacctacatttagaaccactgcactaagaaggacaacaaatatgccaataaattctgttgccaaggaggtgattatgcaagctggaaccctgataacatgaggagaatcccacaatagccaaatagtccatgtactagttacattataataaagccaaaagcagcaggcctacctgactttctcctgaggtctatcatgagcttagagagaaggaacgtggacatatagaggtagctctagatggagaagggcactaggtgtcatggaaagaatcatgtgcaagaagtaaagaggtgctctgaatgtcctagccctgcttaggtgtctgtgtcctcacatgagaatttatccacagttctttcccgctgtaacaatctttggttccaactgcatttgtgagacagcaaaaagctatggtccagtctccttccattgtatcatctcatcaatgtatttctcccactacccttgtgtgaaatacaaacttttttggcttattgtgattatgcaaggtgtatgccaactttttttttttctccacatctttcagctttctgatgggtaaaaattttccttattttgctttagaaaaattctcattggcatagatctaatttcagggagcctcccttgaaagctaaataacattgagaattcatgaaaatataatgtagagcattatgcctgttagcatattagtttaaatagaagtggttcatgaaaatttttgaaatgccagaccctgtcctgtgttttgtattctcccaaatactcatccagatactgttcagaatgtaacatgattattttgaaataaagattttcccctagtttttaaaaaagttactttatacattaacccttatgttcctctttgatcaatttttccagtagtgtaaacagtcttcagggaagtagatttcttacagaaattgtcaagtggctctctgctgttagcatggttactaatcttttggttacttttcatattttttatactttctggaagtggacaacttacttgtaaataaaagtgcataatttgtattaaaaatttttagtaacaatctaatttgtaaaatagatgtgagcagcatgaatgtgtgtgatatgcgtacatacgaattatgtctcttaaaaatgtatcacagacatctttccgtgtccaaacaaatctacctcattctttctaatagccatatgggtataccataatatatttaactaggcccctattaaaagaattttgactcttttgtagctactatagtgttgcagtgtgtatctgtgtatgtatctttgtgtgtgtatctttgtacgagtgtacatatattttccccttggctatttcagatttttttttaggtttaaatcttaggaaaggttttgaaattgtcttaagtattttcagaagcattaaatcatggtttttttacatttttcttttagaagttttatgtcatctctatgagtagctttcagtaatttgttctgcataaaattcccgaaaacttccatttaaaaataggtggcatgactagactttctcagccgaaagagtgaggtcccaggaaggattttggagaagctgtgttcaaatatagctgctgacctgatgtctgcctagagtctggcaaggtgatgtgttgaatctagtgtctgcctgcatgccagcatccctttactgatgagatttgtggttttcatcacttcatggtaatcatcccaagttataagatggagtctctagaaaatcagtagagtatgaaggcccaagtaaaatacatgtgagtgcatgtatgtgtgcatacaaattacttctcttaaaaacgtatcctgggcatttaaagaatgaggacctccgaaggattttgtggaagctgtgttcaagtacagctgctgagcgtatgtcagcctggagcctggcaaggtgaagtgttgaatctagtgtctttttgactcactgttttttttgactcactgtgctttgaagcccttgtcatttgggctcataaaatagatttctgtatactgtctctcctccctgccctcgcccccatttaaaagtatagtggcagaacccaagaatcagagttactaaaaactctctagaaaatttggatgatcacccacctgatcatgtcttttttactcactatgttttttttttttttgagacagagtctcgctctgtcgcccaggctggagtgcagtggcatgatcttggctcactgcaagctccgcctccctggttcacgccattctcctgcctcagcctcccatgtagctgggactacagggcctgccaccgcgcccggctaattttttgtatttttagtagagtcggggtttcactgtgttagccaggatggtcccgatctcctgacctcgtgatccacccgcctcggcctcccaaagtgctgggattacaggcgtgagccaccacacccggccctttactcactatgtttttaagcccttgttttcatttgctccactgtaaaacattccccaagccaatctggagctgaggcaaatttttaacaatttaaaatctggggaatataaatattggataatgatcatcctgaaaaaacaatgaaggtagtagcataatactttatatatcaataaaatggcaaaataagacagttgttgaaggacagaaagagtaactgaagttaggagcttatcttaacacattttttgtgtcataccataggcatcatattttttaaattttttttatttcatacacataggaaaatatatgtgtgtaagaaataataaacacctctttgtacctaccacccaacttaaggaacagctcattgctattccctttggtgctcgctggatgccctttcccagtcacatccccctcccttcccatctgcaggactatactagtaaattttgtattttttgcattattttgctttgttttatgattttactacctatctacatatccctaaataatacattatttagtttcatatgttttaactttatgttgtggaatcacattaaatgtagtcttttttttttatattatactttaagttctagggtacatgtgcacaacgtgcaggtttgttacgtaggtatacatgcgccatgttggtttgctgcacccatcaactcgtcatttacactgggtatttctcctaatgctatccctcccctagccccccaccccccgataaatgtagtctttataacttgtttttttaactcaacattgtttgtaagattcatccatgtaagctgaagcttttttatagagatctttgttaagccttttaatgaatacagtacatacatttctctgttcccctgttagtggacacttggattgtttccagagttttgctgttttgaacaacgctgctgtgaaaatgtctcctgaaacacatttataagagtttttttttccccaagggaattatacctagaaattgaataactagatcacaaggcatacacatctacaacttctgctaggtaatgccaaattgtttccaaggagcgttagaagtgttctcatcaacttttactagtgctagtcttttacatttgtggcagtatggtgggtgtgaaatatttatgtttagtttttcttggtgccatttaataatttttataaaaaatatttagaagtcaaggcagttttttgtttttgtttttattttttgcttgttttgttttaatgcagacattgagattacgacttggaataaacattggttgcaaagttcctaaaaggaaaactttttttggtattctggagcttttctggtactgaataaaataagtatgttaaattatgcatgtgtagtttagaagtcagagcaataattgtgattgttgaacagaatggcagtaaaaagtttctaaacgattgtactgtacaagggacacttgttgtgggtcagttttagcctccccaacttttatgttaaaagttgcaacaaggtttaagggcttatgtttgataggccagatggtgaccagctgtgataaaacacagggaacccttgcaaaggatttcaaaatttatgcagtagtccgccttatctgcagttttgctttccaaggtttcagttacccgcagtcaactgtgttctgaaaatattaagtgaaaaattacagaaataaagaatcgaagagttttaaattttatgcttcccacccatcccacctgggatgtgaatcattcctttgttcagcatctccatgctgtaggtgctgcctgccccttagtcacttggtagccatccaggttatcagattgactcttctagtattacaacacttggcttcaagtaatccttattttacttcatagtggccccaaagtgcaggagtggtgatcctggcaattcagatatgtcaaagagaagctgtaaattgcttcccttaagtgaaagatgaaaattctagacttatatataaagaaaagaaatcatatgctgagactgctaagatctatgataagaatgaatcttttatacatgaaattgtgaagaatgaaaaagaaatgcgtgctggttttgctgtcatatctcagactgcaaaagtttgcagccaatgtgtatgataagtgcttagttaaaaggaaaaaggcatttaaggtaagtatatatagtgtttggtactacctgtgatttcaggcatccattgggggtctcctgagtataaggggagactactcttttagtgttaaatgaacactaaggaacagagatggggaagaggttggagaagattagttcagcagtttgagtataggtaaacagttgtttgagaaagaagaaaaatgtgattagtattttaccttagcaatagtggcatagataatgataaattatagtcacacagaactcttagtatttacagaacgttcacatttgtgatcccatttaacaataactctgaaagaaaggtatcatctaccactgctttattgataaagatataaaaggtaagagagatgaaacatattggccaatgatacccatctggtaagagacagggatggggtgggaccccaaggctcttctcgccaagcccacggtttttttgctttatacttttttgcctcctgatcaccatggctgcagtttctactgtggacaatgtctgtcagcaagcattgatcccctgccttcagcactcttacgtcttagcaaggactggaaagaaaaagccaggagtttacagtctgctggagcaacagaaaagaatgatatgaaatatgaagagaccaaaatgatttataataaggtgctagactatgtagtaaaaatctgctttagctgtaagtcaaaagcaagagcagtcttttcagaatggaatagaaatgttggaattaaaggaattttcaaagttgtgaatttttttcaagataaacatgttttattttggtaattatggtattactaatttgataaccttcagggagccacctaatattatagaagatgtacatataatgacaaaagcaaacattttatttttaaggaccacaatctaatctaaaacaaaatttcccccttttctggtctttggttaattaaggacttatttaaatatcaaagaaagacacatagaaaacatttagtatatttctatacttttattaatgtcctccataccttacacagatacttgacttggctatggtctagataatccatgaaaatttaaaggacagattttaacaactttatgctaaattgatagatctctaggatcagattgccatcactctcagatgcgaagcttccaaccacttataggttcctgatatcttgcttttatacagacctaatttctcttcctttaaactttcttttcctcagttgctatttgattgaaatattgagtcattaaaaatttccaagtgggaatttttgtgtttcttcatctatcatgaagctgctcaaataagtaggtgtttgaataggagtagaaacagtaataggctgaagccagaccaatacagcttcagctaaatgccgaccttgctaaagtctgggaggaccggtgtggtattctacaatgtacaagtctgtagccggtgcccttaatatgttggcttcatgtctcatgactctcttctgtaaatatgcagtttaaaaaatacaagttattctgctgtagaagatacatttgcaaaattgatgtatcccctctaagtaaagttggctaaacaataaggacatatttataattaatgaatttgagaagaatgctgacgatatgcattattctttgaagttaacatttttcaggtcctaaataaacaaaaagtaggttacttctgtctggagtgtatgcaaggggtaccatcttgtccttggttcctggctgctattccaaggtgctataaagtcagctaaagagagcaatcataatacattgatagcatccctcaatgtgtttctgagctacttgagaatcttatttttgaataggtagcaggaaaccatctttgcagggcagcatgggcaaagggattggagggactattattataaagatccactgaactgcttcagtatcataatatcttaaactaaaggactggaaagagccagattccaatttaatctgctcttctatgaattcttagctgggttcatttaaaaagaaaaaacttgaagattgcaagattttgaagacatcttaaaataggtgaactccaaggtgcactttaaacttgagactgataactgaatactccttcaccttttgatctgatattgtcaaaatgaatgaggacttagtgctctagtaagtttggaacagaatgatattaatttattttctcatgattgattcttttttgctttttaatagattaaacttcaccgtagaacagtttctcaacctctggactattgacatttttgattggataattctttgctgtcagggctgttctgtgtgttgcaggatagttagcaacatccctgacaatcacaaatgttactttctgtctctatggatttgcctattctggacatttcgtataaatagaatcatatatatgtggcttcttgtacctggcttatttcacttaacatgttttcaaggttcatccatattgtagcatgtaacagcacttcattttctttttatggctgagtaatattctgttatgtggatatactaccatattttgtctatccactccttagctgatggtcttttaggttgtgtccattctttggctattataaataatgctgttaagaacattcatatacaagtttctgtgtagacatatatctttatttctcttgtgtggatacctaggagtagaattactggatcatatgataactctatgtgttaccttttgaggaactgccaaacatttttctacagtggctgtatcattttacactcccatcagcaatgtataagaattccaatttctctgtccttgcctatatttattaactgtcttttcttattagccaactgctgtggttcgaatgtttgtcccctccaaaactcatgttggaacataatccccaatgtggcagtattgagatgtgaggcctttaagaagtgcttgggtcatcagaggtctgccctcatgaataggctaatccattcatgagttaatgtactaatgggttatcactggattgggactagtggctttataagaagaggaagagaactaatctagtaagctcagccttctcactatgtgattgctgccctgtgtcaccttgggactctgcagagagtcctccagcagcaagaagttcttcatcagctgtggccccttgaccttggacttcccagcctccagaaatgtaagaaatccatttcttttttttaataaattacacagtctcacgtattcagttataccaacagaacacagactaagacaccatcctattgggtatgggtatctcattgtgttttttatttgtgtctcccaaatgactaacgatgttgaacatcttttcatctgctttttggacatttgtgtattttctttgaagaaatgtctttaacattctttgcccattttaaaattaggttgtctttttattgttgagttgtcggtgtgtgtgtgtgtgtgtgtgtgtgtgtgtgtgtatctagaatatatgtgtatgtatatatgcagatatattctaaacactagacccttatgaaatatataatttgaggacaatttctcccatttaaaaggccatcttttcacttcttgatagtgtcatttgactcacaagtttttaatttttatgaagtccaatttattttttaattctttgtttttggcactgtatctttaaaaagttgcctgatctaaggtcaaactgattttcacctatgttttcatctaagaattatagttttagctcttacatttaggcctttgatccattttgaattaatttgtgtatatggtgtgaagtagggctctaacttattcttttgtgtaatgatacctagttgtcccagcaccatttgttgaaaagattattctttccccattgaatggtcttgataccttgttgaaatcaactgaccataaatatataggcttattcctggactcacaattctatgagtctgtatgtctaatcttatgccagtaccacactgttttgattattacatctttgtacaaagttttgaaattgggaaatgtgagtcttccaactttgttcttttttaagattactttgcctatattccgtgttcgttgcaaactcatatgaattttaaatcaactctccatttctggaagaaaaaaagaggcaattgaagttcagatagggattgcattgaacctgtagatcagtttggggaatattgccatcataacaattagtaggtcttccaacccatgaatacaagacttctttccatttctgtagatatttagtttctttcattaatattttgtagttttcaatataaaagtcttgtacttcgattaaatttattcttgaatattttgggttttgatgcttttatgaatttgttttcttaatttcactttaagattgttcattgctactgattagtaatgcaactgatttttgtgtgttgatttttgtatcctgcaacctagctgaaatcattgattagcataatagagtatttaatagatttaggatttctatatataagatcatgtcatctgcaattagagataattttacttcttccctttcaatctggacattttttacttctttttcttgcctagttgccctagctagaacctccagtgcagtgttgaatagcagtggtgagaatgagcatctttgtgttggtcttcatcttgtggggaaacctttcagtttaagtgtgttgttgtggggttttcatagttgtcctttatcagattgagaatgttcctttctgttcctagtttgttgagtgttttctttttgattgttttaatcaggaaagggcattagattttgtcaaatgctttttctgcagctattgagatttttgtgtgtttttctggtcttttatggtttatcacattaattgattttcatatgtcaaacaaaccctgtgttcttgggtttcatctcacttggttatggtttataatcctttttatatacttgtagattcagtttgccagtattttgttgaggatgcttgcatttatatttataagggatattggtctgttgtagctgaccagtaagtatagtaagctgtatagtttactaagtgttccctctgttttgggggagactttgagaagaaggattgttggtaattgttctttaaacatttggtaaaattcactagtgaagccatctggggtcttctttggaagttttttgattactaacttaatgtctttacttgtttgttataagtccattcagatttttttctccttgagtcatttttgacagttggttgaggaatttgttcatttcatgtagttatctaattggttagtgtataattattcatagtattcctttataatcttatttttttgctgtaaggtcagtcataatgttcactctttcatttcggattctggtaatttaagagtcttctctccttttttttcttggtcagtctagctaaagtaaagttttgtccgttttcaggggaacagctttttttttttttttgaggcagaatttccatcttgtcacccagtctagagtgcagtggtgcaatctcggctcattgcagcctccgcttcccgggttcaagagattctcctgcctcagcttgccaagtagctgggattacaagcgcccaccaccacgcctggctaattttttatatttttagtagagacggggtttcaccatgttgggcaggctggtctcgaactcctgacctcaggtgatctgcctgccttggcctcccaaagtgctgggattacaggtgtgagctaccgtgcccaacccagctttggttatttttgttgacctactctattgtttttctcttctctatttcacttatttctacactggtctttattattttcttccttatgcttgctttggacttagttcttctttttctagtctcttaaggtggataattaagttcctgatttgaattcttacttctttgtaaggtggtcatgtactgctatgaatttccttctcagaaatgtatatgctttcactgcatcccttaagatttggtatgttgtatttttgttttcatttgtctcaaggtatagtcttctgatttccattgtgatttcttccccctctaacccgtttattatttaggaacttgttgatttccacatacctgtgaactttccagatttccttctttgttaattctcagtgtcattccattctggtccgagaacatactttgtatgatttctatcttttaaaatttatttggcttgtcttatgacctaatacattgtctatcctggaggatgtttcatgtacacttgagaagaatgtgtattctgcttttgttgggtagagtgtttgacaggtgtgttggtacatagttctgttcaaatctgtttccttgcagatttctatctagttgttctgtctattggaagtaggatattgaaatctccaactaatattgctgaattgtttattgttttcttcagttctgtcactttttgctttatatattttgaaattctattgttaggtacaagtaagtttatgattattatatcttcttgatagattgattcttttatcattatacagtgccctataagaacaatttttatcttaagtctatttgtctatattagtatagccacttcagctttcttttgtttactgtttgcatggaatattttcttcttttactttctatttgtgttcttgagtctaaggtgaatctctgtagatagcaattggatctgccaatctttgctttttatttggggagtttaaaccattgacatttaatgtaattattgatgaggaagattacttctgatattttgccatttgtttcctttattttgtgtctcttgttcttaaattcttccattactaccttctttcttttgtattacatattttctagtgtaacgattttaatttctttgtcatttcttttgttgtatgtttttagttattttcttagtggttgccacggagattttattgtcattttaacagcctaggttgggcacagtggctcatgcctgtaatcccagcactttgggagactgaggcaggaggatagcttgagtccaggagttcaagaccagcctgggcaacttactgagatactgtctctacaaaaaaatacaaaaattagccaggcatggtggtgtgtgcctgtagtcccagatgcttgagaggctgagttgggaggatagcttgagcccaggaggttgaggctgcagtgaactttgatcacaccactgcactccagcctgggtaccagggcaaaactagcccaaagaaatgaaggaaaaaaaaaatctaatttagattaatatcaactcaacttcaacagtgtataaaaactttgcctctgtatacctcttctgcttccactctgtgctgttattgtcatagattttcatctttctacactgtgtgtttatcaatgtagatttaaaaatattgcttagtagttgtctttagaatccgatacggagaaaaggagatataaacaaaagatgcatttttactgtcttgtatgtttacttatgtaattccctttcctgatgttgtatttctaaaggcaaagtagggttattgtgagtgtccttttgtttcaacctgaaagactccttttagcatgtgttggagatatgctaatgatggactctcacagtttttgttatctgggaatgtgttaatttatccttcatttttgaaggatagtgttggcaggatacagaattcttggttgacatgtaattctttcagcattatgaatatgtcatcgtactgtcttctgacctccatggtttctgataaggaatcaactgttaatcttattgaggatcacttgtttgtaatgacttgcttgtcgtgctgctttcaagattcattctttgcctttagcttttggtagtttgattgtgatgcatttaggtgtgtactttattagtctgttctacttggagtttgttgagctttgtagatgtatttcatcagatgtgtcaagttcttttgccactattttttttttaaataatctttttgcccctttccgctccttctgtcactctgattatttgtgtgttgctttgtttggtggtgtcccagaagtctctgagactctgtccagttttttcctccccattcttttttctttcacttcctcagactggatgatctcaatttgacctatcttcgagttcatggattttctcttctccaagtgacatctgtgagatgaatttttttctagagaatttttcatttcagttattctacttcaaaatttctctttggttcagttttatcattgctatctttatattattctcagtttaatgagatactgttttatactttcctttagttctttagacatagtttatgtcactgaatatatttaaaatagctgattttaagtctttttttttttatttttttggagatggagtctcgctctgtcacccaggctggagtgcagtggcacgatctcagctcactgcaagctccacctcctgggttcacgcaatgattttaagtctttgtctatgaagtctagtatctgggcttcctcaggcatagtttctgttttctttctttcttttcctgtgtacttcgtttctttgtataccttgtaattgttgttgttaactggacattttgaatattatagtgtaacaactctggcagtcagactgtctcccctccccagtatttgttgttggtgagtattgtagatgtttgtttagtgacttttcatggctaattctgtaaattttatattctttgaagattgtgggcaccctgaagtctctgtttgttagtttagtggtcacctaataattaacagagatttcattaaatgcctagaagcaaaatatcttccagtctttgcccatggcctctgtgtatgcattagggcaggccttgaactcttacccagggagtttacaaccctgccttagcctttactaccagcttctgcagagcattaaggtcaacaggtggtgagagtttggagcctactccatctttcctgagcatatacacagccctactcatgcatgtggccctctagatttccaggagtatgttggaccctttcaaagcccttacagactccccagcttttcctctcaatctttagactagtgtgttgttttcttcaacagttatctgtcaggcagcagcaaattaagagattagcataaatgttttcaactcctccacccgtcatgtgccccagggaagcactaagccagttctaagttaggcaaaataaagacaatccttttgaggtggtcttccatggagtcaccagacaggtaaaccaaataattaattacaagtctttggctggatacagtggctcacacctgtaatcccggcactttgggaggctgaggcaggtggatcacaaggtcaggagattgagaccatcctggctaacacggtgaaaccctgtctctactaaaaaatacgaaaaaataggtggctgtggtggcgggcgcctgtagtcccagctactcgggaggctgaggcaggagaatggaatgaacccaggaggtggagcttgccgtgagccgagatcacactactgcactccagcctgggtgacagagcaagactccgtctcaacaaaaaaaaaaaaaaacaagtcttcatgaaagaggtccattctgctgtctttcataccaggaatgtggaatgtggactgttattttcatggctactgctaagctaggaatcaagggatagatggggactgggtaaaacaccacagagtttgctgttcttaccaagaataagctggggaagagggttgtttttgtttttcagtaaaaattccctgggctgcttcaagccgttgattaattttcaggttccgaaaaagttcagtttgacagtttttgccctttttatttgcttttatggatatgtagaacttgagttcttttttccaccagttttgctgacattgttttaaaagcactttttgtaaaacccaaatgttgtctctctcaaggctagccaataattaaaaatactgttactcccctttgattttggaaatgaattcgtattgaccaaaattcaatactagaggtctttcaagctgttttaccatttatctaaactttagaatctaatgattcctgtacattgtctagcatactggtggtcctcaattgtcataagttcaactttggaacaaatgaactttttgtgtgcaagtttccaattgtttggaaattacattgatgccccctccatcaaactgttattcgtgggacatctaggaatttcttacagcagctgacaaatatttcaagtcagtgcctggtagtactgtccaccaggcaacagcttcagtagtagagcgatctttatctataaggcagtgtttgagcaattgtttattagtgttttcctaactactcagaagaactatcaggggttatagaggtagctcagagagttgggtgcaagtagagaaatccacccggcttgcattacacatcttatttctagagaagctttcctttgaagaaggagttctaaggtttaaaaaattaccttgaatgccacttatattgcattttaattttattttagagaaatcaatggaaagtagaaaaattaaggcactgatactagtgttaagaatgttggttaaagcttctggcaattaattttttatttccttttttaattttattaaaatttaacaattttcagtttatgctgtaatccagaccaaggtttcaatctaatgaagttaatgccagtgttgctgctacctattttgtctttagtcattcagccatgcttcctacttatactgaataagctagcttaatctaacaatcaaaaaagaaagctgttgcctaagttaagaaaaacagtttgaactgttttcaaactaaatacccagtagactctctagttgttgacaggagaatgcttaattcagaattgtcctgcagtagatcattttatctcattcctgttcttctataggatagcttatttgtttgaaattgtatttaatatgttgtgatttttgtgtgcttgtttctatttttcactggatagactcaagataaaacctggtaccctgcagtgtagctatcagtttatagcagaggaaatttacattagaacttggctgtgtatttacatgtatctaacttggaggtcactctgcttactgttgatatatcagtcatattagatgagtccctaatgagataccagaaaccccggaaacatcattaggtggaacagtgtccttaatgctttattaagtgttataggtaagacaaagcctagtactatttgtggcatcaaggttaggtgtttaaagacctgtattcttctattgtcatgttgaaattgttcccttgatgtagcaatagaaaattttagattaggcttaagttaatcagcaaacaaagataaaagtctgatactatcctaaatattttgtgtttctaaataatttaacagtgatccaattagctactcctgtagaaatgtaattgataaacttttcactctcttttaaattgccatcttgaattttacctgttttttaaagctgtctcaagtcctctctaaaaaaaggcagtcatttataaatttagaaaagcttgatagcacagaaagtcacagaaaaatgtaaacatagtttaaaactgaattgtatacaagccactagaagtacttttattaagtttacaaatattagtagagtggaactcatgcatttaatatgtttgaaacttttgatcaaatactgtgctatgaaaaacattttagataattattctttaatcatgtgtgtgtaaaatgtggctttttttgacaaccaagtagcttttctgtgtgccaaactgtgactttaaaattttaaagtactcaacagagtaaacaaaccacaaataccacttaaactgtacacatttgcacatgcatttcctataaatagtacatgggtttcaagtcttcacttttgaaattcagaaatgggttttttctccttccagtagaaataaaaacttgatttattttatttatttatttattttatttttgagacggagtctcgttctgtggcccaggctatggtgcaggagggtgatctcagctcactgcaacctctgcctcctgggttcaagtgattctcctgcctcagcctgccgagtagctgggattacaggtgcctgccaccatgcccagctaatttttgtatttttagtagagatggggtttctccatgttgggcaggctggtctcgaactcctggcctcaggtgatctgtctgtctcagccttccaaagtgctggggattacaggtgtgagccaccgcatccagctaaaaacttgatttttaaaaatccaaatcgaagacagaattgtgtattttagtacatttattagcagccttgacgctataccatatggctgtttatcatttaaacagcttgtaaaagcaaacacttcaggattcatgagtggcagaaggactgagtactttgggaaataagagagaacttttgttgaggatggttgaggaagagtccaagacaataataggcagaataagcaaaaatctagagactcattgtaggcactcaagtatgtatttgttagaatgaatggctgaacttggtatattgaggaacactgagaaagccatactgactggaagatagttcctacaagaaactggtgagacatatgttacagtctagattttggtgagccttgttaaagtttgggctttatttttatacggggagaaagtttcacaggggtttggaaatgaggcttggagctgttaatggggacacagtgaggttttagggtagtggctttcaaactgtttaaatccaaactttgatgataaccctgacataactattgtttataacttccatttcagttgtattggttttatcaaaacatcttcattgatcttactgattgcttcctatgcagattaatattataaatttgaatgtacaaaggaagctttagcagtaaaatagcaacttttatctgtcttacgtattggaggttctgcataagatttaattttttttttttttgaaatggagttttgctcttgttcacggggctggagtgcaatggtgtgatctcggctcaccacaacctctgcctcccgggtttaagtgattctcctggctcagcctcccaagtagctgggattacaggcatgtgccaccatgcccggctaattttgaattttagtagagacggggtttctccatgttggtcaggctggtctcgaactcctgacctcaggtgatccgcctgcctcagcctcccaaagtgctgggattacaggcgtgagccaccgcgcccggccaagatttaattttttaaaagaaaatattttgctaagggtttggaaactcttgttttagcaagaatggattaagactgattaaaactaaaggcaaagaggaggctcttatgtttggaattctttgctaatatttacacaatataattctctccacaaatatttaatggtaccagatattagatggttataatggcaaaagtgttcaaaggatgctatcatattcatgattcatgatcaaaatgaacattataaggctatccctcttcagaattaaatacgttactcctgtggaaaacttgcttttaatgtagaagttgtcccagagcctttcttcctttctcatgtcctcttatgtccactgctgagctaacatgggtctcactgaatgattaagaaaaaacatcttaggtggggagttctgtatatagtaaatgtttaatttattggggtggtgaacgggaagtgctgctggcaagagaggatgggaagagaaatctacccaaatccttacccgctttacagaacataaacttcctattcagtagtacacaataacttaacgatcaaggcatcttaacttttctgttttcagatgaaagaactatcgtttggcttgatcaagtatttagtatttattcgttcactcaagtgcttacgtttttttgttatctcagggttttacgttagttattaaccaaaagaactagttttagttctggaagtctaaaatatataagagaaggtgaggagtaataagagaagatgaagggagactttcggaatggcctatgaacttctagtaactataccaccttaaaatagacaaattacaatgcagttatgaagatatgtatttttcagtgaagacaactaaaatgtttgcacagaattttcttttttattgagtgttagaaattctattttggagatactaccttgcacaacataaaaagaaaaagtgagtgtggaatctaggaatctacgtggctctaggaaattttttaagtgtggaaactgaaggagagcaagagaaagggagcatggcattcccctgtttgtagttcatgaggtgggtttaaattgccttttgccaatgcagctgcacactgaggattacagaattctttttaaatgtttgtagaattatttttcacttattaggtaaaacgtgtattttttgattttctccaatttcagctttctcatgttgctatgctcaattttgtataccatatatagttttgttaaattgacaaagtggtgttttttgttcttctttttcccattggttaaaatttaaagagaaagtggaagctagaaatttatctaaaaaatgtaactttccctgtaattattaaagtatcaatctaaatttgaattttctttgtgcataatcttttttcaagctatttaccatgttgacaaacttgctttcctgtggcaaatacactagcaatacgttataaatatgtaactttcaacctatttacagttgatgcttttttagccctttggatttaaaatacaagcactgaagaggtgaggaagtaccactgctgcctcagcattatttcgaaattctgtttataaactatacaatttccaaggtcatgaatccagcacctttccaggtactaactattgggacaaagatagaatttgattttatttatttacctattgactgaagtctaacttaaatcttgcacctagtaagatcttagaaataacgtgtgtactctgacctgtaaactaatcctagtattctgtgtgtatattctttctcatttgggctcttaaaaggaaaagtaacgtacatctgatgatcattagcactgagctttttcagcaaaaagtatatgtttataaagaagtataggataatttagtaatttaataatgtgacaacatttgcgtgtgtttttttttttgagaaatacaaattgtgagaaacagaaaagtaaaagaagcagcagcagaaatatcactataggatcaaaagattgcaggaaccaaaactccaaaattattgggcataatgtactaaaaacagggcagtggaggaaagggacagtccagactagctctgagggtccaaagaaagtattaaatattgttactggagtgatttgctctgctatttgggcttgggaattaagtgaaattgttgatatactagacagatacttcccacccatttttctcttgataatcagggttcattttttctattttctatttctctggatgctccatttcttaatattaatattaatattaagctctcagtctttatgctaaaaattggttatttaaaacaatttaaatcaacttcagtctaattggcttaagttcaaatccattttaagatcgatattgtgtcctttaaaaattttatttaaaagatatttaaactgatgagaggatactacccattccactgataaactattactgtaagtttgtctattgagggctagttatttggtttaaaaatgctgagattatggaaagtggattggaatattttggagcaatattaaaaacagtatctgtaacaatttaataaacttataaattcctctttctctgttgatctatcttgaaaagacactctatgtctctaggcattccttctctgtggtgtgattggtagacagggagtaaacaacttactgtaaatgggcaccatgccagttggcttcaggcagcatcaagcttgtgactcacagtcagggttaggaaaatgccttttaacttgtttgtctctgcctcttttaaacattaaaggcacaactgtactaattattaagtatttcataaggtcttttagggcttataagatcttttaggaatggcctggaagttattagtactgtttcattgaatctgaatacctttaacatgataatgagaagtttttaaagggtggttttatagttaaacggaatttctcaaattggcttgctccttatgttgatttatttaggatcacatttgggagtttctctgccctactttcaatgtatttaatttactgaccatcactatttggggggaaaatgttatatgatatttagaaaccaagagttttggagtttttcccccattagatgtatttatttatttatttattattttttaaagacagggtcttgctctgtcacccaggctggagcacagtggcatgatcctagctcactgtattcttgaactcctgggctcagactgtcctcccacctcagcccaagtggctaagtatcaagtaagaatcacctggcaaattccaaggctgtataccagatttcctaaattagaattttggggttgggtatctgaattttagtaaagccctccaaatgtttctggtattgcttctaagaacaattgataacataatagctgtggccattataggggtattctgtcatatttagatataagcataccttgttttattgtacttcccaaatattgcgtgtttattttgttttgtttcacttacaaattgaaggtttgtggcaaccctatattaagcgagtctgtcagtgccatttttccaacagcttgtgctcattttgtgtctctgtgtcacattttggtaattctctcaatatatcaaactttttcatcatttttgtatctgttacgaccagtgatcagtgatctttgattttttctttttttttttttttttgagacggacttttgctctgtcacccaggctggagtgcagtggttcaatcttggctcacagcaacctctgcctcccaggttcaagcaatcctcctgcctcagcctccccagtagccgggcctacaggcgtgtgccaccacgcctggctaatttttgtatttttagtagagatggggattccccatgttggccaggctggtctcgaactcctgacctcaggtgatccgctcaccttggcctcccaaagtgctgggattaccgtgccagcctgatgttactattttaattgttttcaggcaccataaacctcacctgtataaggcaccgtacttaattgataaatattgcgcatgatctgactgctcttccaactggccattccctgtctgtctccctcttcctgggactctcaaatccctgagagacaataatattaaaattaagctaattaataaccctacagtggcctctaagtgttgaagtgaaagagttgcatgtctctcactttaaataaaaagctagaagtggctaaacttagtgaggaaggcacatcaaaagccaagacaggccaaaagcaaggactcttgtactaaacagctaaattgtgaatgcaaaggaaaagctcttgaaggaaataactagtgctactccagcaaacatgtgaatgatcagaaagtgaaacagccttcttgctgatacgaagaaagttttagtggtctggacagaagatcaaaccattcacaacattcctttaagccaaagcttaactctcttcaattctatgaaggctgtgagaggtgagaaagctgcagaagaaaaattggaagctagcagaggtcggttgatgaggtttagggaaagaagccagcgctgtaacataaaagtgtaaggtgaagcagcaagtgctgatacagaaactgcagcaagttatgtagaagatctagctaagattactaaataatagattttccatgtagatgaaaaagccttttgttggaagaagatgccatctaggactttcatagctagaaaggagtcaatgtctggcttcagaggacaggctgacattcttgttaggggctaatgtagttggtgactttaagttgaagccaggtctcatttaccactccaaaaatccgaagacccttaagacttatgcttaatctactctgcttgtactctagaaatgaaacaacaaagcctggatgacagcacatctgtttatagtatgcttcactgaatattttaaggccactgtaaagacctgttcaactgctcagaaaaaaatgattactttcaaaatattgctgttcattgacagtgcacctgggctcacccaagagctctaatggaattgtacaacaagatggatgttgttctcatgcctgccaacacatcatccatttgtagcccatgaatcagggagtgatttcaagtttcaaatcagtacattttgtaaggctatagctgctatagacagtgattgctctggtggacctgggcaaagtaaatcaaaaaccttctgaaaaggattggccattctagatgctattaagaatttgtgattcgcaggaggaggtcaaaggatcaacattagtagcagtttgaaagaagttgattccaacagttatagatgaatttgaggggttcaacacttcagtttaggaagtcactgcagatgtggtagaaacagcaagagaactagaattagaagtggagcccgaaaatgtgacggaattgctgcaatctcatgagaaaacgtgaatggatgaggagttgcttcttatggacaaatgagcaaataaatttttttcttgagatggaatctactcctggtgaagattctgtgaaccttgttgaaataacaacaaaggatttagagtattacataaacttaattggtaaagcagcagcatggtttgagtggattcattccagttttgaaagagtttctactgtgggtaaaatgctatcaaacagcatctcgtgctacaaagaaatcttttatgaaaagaaaagtgaaacttcattgttgtctactttaagaaattgccacagccaccccaccttcagcaaccacctctctgatcagtcagcaggcatcaacactgaagcaagaccctccacaaggaaaaagattacaactcactgaaagttcaaatgattgttagcatttttaagcaatattttaagattaaggtaaatacatttttaaagacacaatgctattgcacacttaatagactacagtatagtataaatataacttttatatgtagtgggaaaccaaaaaattcgtctgacttgctttgttgcaatattcactttattgtggtctagaaccgaacctgaaatatctcagaggtatgcctgtattaatattattttgcaagtaaaaaacccagcatataaaaaaaacgtagaatatgttgagagttcagtaatatggatgaaaatgtttttctctaactgaagaacatgataaattataattagggaaggatataaaccaagaaaatatgtctgagatagccaattcttgcagttcataatatgaaaactcattataccaatctcagtaagaatacttttaatagctgttatttctttgggatatagaatttataaagtacacagtaatcttcttatgatcaatcctaggatcactttacaaccacttaccccatattacaatgtagtaccaagacaagcagaccaaattatagaaggacaaagtttttgctaagcatattttgtcatcagcataccgcattgtgtgtgcatgcatgtgtgtgtttgtgcatgtgtgtgattgtataaaatattagaaagccaccccagaaaagttaaatgactaggaatgttgtgaagggattaagctacccctaaaattatataacaaaactctcttcatctattattaggtcatctttagaacatcttctcttaaatttgttataggtctctctcatctgtttggattaaaattggtctgaaagcctaaaatggctttttacctatataattatttcccaactagcttgtagtataggtgcaaagctatcacacttgctaggttagtgaagtatgtaaaaactaccatctttcaattaggaaccatcggatagcttctacaggattgctggggagaacctttataaagaaagttatatctttataaattttttgtcattttacttagctgagaatataaaataagttagctaataatagagtagaaatgttttctgtaacagattaatattgatcaaatgtgttattaaatgctaaaacaccattttttttctctgtaagccatgtgtttcatgccacaacacaaaagggacaattgtctgtgttttatgacagttctgttctgtcagatgctgtttgttcattttggtgaataaatgaagagagccctggacacatctttttttcctcaacaaaagaggaaaattattcttgtctgtatgtctataatcctgactctttgaatggctttaatttttttaaagtcagcatttttttataaagataggtgtttggaatgtgggcgatatggctggacagttagattgggaccaaataatggaaggctttgaacatcatgctaagaggtttgggttttactctgaaggcagtagagaaccattatgtttttaagccaggattgacttgttctaagctgtaccttagaaatattactctggcagttgtacataggatgagctgtatgttgctttgttttgtttggggagacagttctcgaagagagactacatacgaaggcagttatatgagtcattactaaaggtctggcaagaagtagtaaaagcattaactggagtggtagcagtagggaaggaaataaaaggatagatgtgggagtcatttggaaagtatgaggcaattcattgaccttacagaatcactggttttctgcttccactccattcacattgacctttccaaggttatcagtgacctgcttgtccttaaattcagtgggcactttccagtaacctactgttggcaccagccctgtgctagacaccaggatcctgtttgtaaaggcatctgccagtggtttctgtgacacaattctgtttctagttttcctccttctacttctctagcctcttggcaagttcttctttcagagtttctcagagctttgtgctaggccctcttctcattttctccttctctaagtgatcccatccttttctgttgcttcagttaccatttgtccttatgcaaaggacagccatatctactgtatctccagctcagatgtatctctttgcctcctgacccatatttccaactatctaactgggtatcttttcttggatgagttataggtctctcaaacacaacatgtccagaataattcattgacttattctaaggcctgcttcctctttctcctgtagtccctatctcaggaaatatatggtgctatcaaccccaaagcagaaatctggacataatccctaactacccttttcccctctctgtgcacataatttcagtcattaggcctcatagattggactaaataaatacctcgcaaacccttctacttatattcttaactgctcctaccttaagccaggctaccataattttgtagctggatgactgcatcatcatcttgactggctcccttgtcatcttcaatctatattctatactgcagctagagctttcaaacataaacatgtgatcagattagtcccctctttagaacaccctagggttctcactgtcctgagtacagtctaagggtttaccatggcttacagggtcttttatgatttggtgagctttttattgtataacctttctaaactgcctttacttccctctttcttggctctgtgtctttgcataatgctgttccctatacttcacctcacgtctaaccttcatctccttttcacttctcctcttcctccaaaatccagctgaatatcacattgtcatgcaggcccattcttgatctcccacgtttgggttagatatccctcttcagtaccatcaccgcaccaggtgtgtcccctatcctagcatttgcctcattgtattacaactactgtgtactcgtctctacagctcctgctagtctaaaagttttgggagagcaaaggttcatgtttgtgtttttcactgtggtataccccagtgcctagtatatgataagctctcaaaatatttgttagatgtatgaagaaatgagaaagagaacaggaagagggtaagtttcaagactaggaaacaaggctatgaaagctgcaggaaagcagcaggttaaaacctagaagaagagtttgttttaggaaatactgtgttttaaaccactataactgaagcaaaaacccaaggcctgggtgtggatagagtccactatctgataacagtggatactgatgcatggcagagttggagaggaagagagccagattccaaaacagaaggggtaaagtcttctaagaagatagattatagtaagaaggattaggggatagaaatatgagcctgttccactcatagatctcaaacatgaaatgatgagtcatcatgaagagagtaggcaattgtccagtgaagaaggggatgctaacccttcttaaccttgaatctctcaggtagaagcagttagagaaggaacagccatcatcagatagtgttgtaaggaaaatgatatccttggggaaacctgcattttggtaaagcaaagcaactaagaaagaatatactaccactgtttaacaatcgccacaaaaagacagtaggatcatctttgacccccctcatcctttctcaggaacttggaggactaagaagagagaaatctgtagaagaggcttctctctctgatcctccctccacttcagttttaccacatgtaatgcaacaataattaagaatttgtgtaaaatttcaccaggttggcatgcatggagagaaaaattattcagatgttttcctttgtcaataatacaaggagcatttgtagggaaaaatatttacaaatacagtaagacctattctctttctatatttatgggaaaattttaagttgtgcccttgtttcatgtgtgtttctatttaaagataccatacttaatatatattgttgattcattaacattgaactcatggctaacagcactataaatcatgtctgatcaaaacttatgatacatgtactttcttcgtaaggtacatcatagtcttctcgtacatgggaactctaggtagtacttcaggactatgcatagaggccattttaaacagcaaaattcccaacaaaaagcacaaaactcaaaaaatgtgccactaaatttaccatgaaaaggacacttgtttacagtttgagagctaaaacaagaaggtggcgtgtcacttcgtttgacttcagctgggaacatgcatatcagtcgactcaaattttttgctattctgtgcttatccacgaatcgataggaaagcaagtgtggatttgggggttacaaataaaatgtagcaaatgtgtaaacttgcagatgtggaatctacaagtagttagaatcaactatgttagtctgatcattaaatcagttttttaaagtactattgtaacaccttataacctgccccattcactgagtgttgtagtttatagtttcattgggcattttcagtagttttatctgaagtcacatttcaaattttgtaattgaagctccaaagtatgctaccggaaacacgagctgatgctgtgagacaaaatcaacaggtaatccaccatcacaactgtgggctagaatgctcaagaaaccttggaggcccagagagctgagatgaatactgaagaatcataggcaggtttactctgtcaagctgcctgtattttgagggtgtagtcctcaaaccaaaaagacaccaaatgaacaaactcagatggcctcactggggaacagagattgaaagctgacactggaatgtgtacttaaaaaaatgagagcccgttttggaaaggcagactgggcacagaatgtggagagctatatttgctaactgaagaaatttagactttatcctctacaaaacaaagctattggtttttgaaggttgcataaaagctgcattttagcagcatatattttggtagagctgttacctgcctgaaaacatcaatgtcatttcacacaaatgatacttatcccttggtgtttgatctaaatttctacaatgagaatgtgattttatagtctttactggggaaggaagtaggtttttcaggccgaaattcttgtgtagcaaaaattaacacttaagttagcccttggcaatctccagttctataatggtaaaatggatttcccagaaagtcactctctatccctttgaatagacattagaaataacatgtactttaagtgggatttacagaggaagggggcctttaattctttactagtgtgatgccctgtaaaaaaataactaacattagagttgaggcctagaaatagcagcactgggttaaagtctgttttcaagtgcaagtttttctttttattcgtgtgtgtgtgtgtctgtgtgtgtttcacatagaaggaggaaatgccaatttcagttcttacaaatattaatgactgcaacttataaaaatgttacagactatattcttcccttttgtaacagatgagaagattttgaaatttagtctctactttttagtttggtaagacaatttgaataaactgcaataattgcaaaagaattctgaatatttgaacatttgacattttctatgtcaaatatacatttcttgtactatataaacattctagaaaagagagacaggcagggaggaaagtgctcattaaaaagagcttcaccctctctgaaaagggatttcctttacagtgctgtgtactaaagcctgtgttgtaaatcagaaagcactgagcacacatgttgctgctttggtagcatcagaagtcgattttcattagccttataccattcactatttctgccaagcaatcttaaattataaaagaatcttatttgattttgtgattctcttgttttctgctcataaagaaaatatcctaaattgaacaatggcatgctacgtttttagtttttaagacagctaatgtgtaaaaagacatttaaagtatagttgtgttaagtttttgaagtttacagttgtttcaattttgctgctatactttgttaacatattttaggaatatttcattttagtcacaactaggatataaacattattttggtggcgatctccttgtaatcacgacgtcaaccaaatttgggaaattttgatttgttagatttataaattttacagtaacacaaaagtctaatttcctatatattttcaaggcccctatacctttgtcaaaataaagtatcaatgaaaaatgaaaaaatcataaactatgttcaggccaaactgatactgactttgttaaaaggctagatagaaatctgttttcctcttctgttacatctcctcttctggagaccactctgtgtggactgaaggtttgagatcctaggacctaggctagaacagattaggagattgtgctgtatgttaagtggcagataccatggaattctaagcctgttacgaaggaggagaagaagaggcacaatgaccctgacacagcccctgggttgaccacagcagatatctcacttgagcaagtagatatcatctcaattgcttgctgattatctctaacttgtcagtaacttactttgataacctagatttaggagtctgacagcatgcagtgtatgcctcataataatctgctgtttatgaaagtcataacattgtatgtttagcataatggtgaagagcctgccatctggaatggtctacttatttgggatccacatacagtaagctctcacttaacatcatcagtaggttcttggaaactgtgaccttaagcaaaacaacctctaatgaaaccaattttaccacaggctaattgatataaacaagagttaagttcctgtggcatatttctggtcacaaaaacatcactaaacttctaaataaagacccaaaacacttataatattaaccactgaaataaatgtgagctatatatatacatttaagaataataaaaacaaaaaataattatttacccaatttttggtgaaccagtgagtgatagtgatcatagtgatggtggatgaaatcaaggaataaatatttgcaaagtgaaaattgtaagaagcaccccctgtcaccacatagctcagaaataataattagggcaggcttgctgagcatttttaaactgcactgtttattgtcatgcatttgaatgattatcgcagactttatgaattttcattttatattaatttgtaggccaggcacagtggctcacgtctgtaatcccggcactttgggaggccaaggcaggcgggtcactggaggtcaggagttcaacaccagcctgaccaacatggggaatccccatctctactaaaaatacaaaaattagccaggtgtggtggtacacacctgtaatcccagctatttgggaggctgaggcaggagaattgcttgaacctgggaggtggaggttgcagtaagccgagattgtgcccctgcactccggcctggtgacagagctagactctgtctcaaaaaacaataataataatttgtattcattcattttccaatgtgttcattccagttcagggtccagggggcctgcagcttatactcatagctcagagcaactgaccctatagacaggacgccaccccattgtagggtgcactcaaatgcacactcacactcaaactgggacccttcagacatgccagttaccgtatcacacacagcttcgggatgtgggaggaaagcgaagtatctggagaaaaactacacagacatgggaagaacgagccaactctacacagacagtggccctggacagagctgggcaggcatcagttttttttcttttttttgtggggggtgagggtggggcatggagtctcactctgtcacccaggctggattgcagtgcagtggtgtgatctcagctcactacaacctccacctcccgggttcaagagtttctcctgcctcagcctcccaagtagctgggattacaggcgcccgccaccacacctggctaatttttgtatttttagtagagacaaggtttcaccatgttggccaagctggtctggaactcctgacctcaggtgatccacccgccttggcctcccaaagtgatgggattacaggcgtgagctaccgcgcccagtcagcatcattttttttttctcatcaacgttaaaacaatgttgaacaaaacattattcaaagacctgccgtatggctattttctagttgtgtgactttctttgggaaagttagcaaccctttctgagcttaaatgtcctcattcataaaatggggctagtaataatgcataaggtttttgtaagaattagaattaataaagtacttagaccataataactaattagtattagttgttgtctttgctattattttgatgtggtggttgtttggtttcacctgtgtactatcaggacatgctgaaataaaatttaagaattggctttataatattagaaaagcaaacttttgtacgatatgggtatgaaaaattgttgggagtctactttttctctcttacctaatttgtcttagtctttttaaagcttagattttccaaatgagccatagcaaaatataatgtttaaaaatgtttaaattctaagcactatgtcatagttaaataacttaaaggtgctacatcttatacagtccaaaaggaacataattagtaaaattctacaatttagaaaaaaaaatagctgacagtgactgatttataaaagtaaaatatcttttgttaatactaatattctttttataaattaattgatgacaaaaaattgagtgaatgagatttgcagttcatttatctatgatgctggtttatttaatctctataatttgctgtatttgaaagagcatagtgatagaggtcatgataaaatctaggcccagtgccacaactaaatccctgtaggaactctcaaggttttgatttcatctctgaatgggaataacaccttccaagaatattatgaagattaaaaagttacgtatcataaatacacacagagtaacaatactgggaatattgcaacttgtaagaaagaggaagcatatggcatattctgatggttagggatatggactctgtagctgggatgcctgaaagagaactctgactccactaatggctagttatatgaaattgtgcagataatttaacttctctgagtttgcatttttctttgtctatataatggggataataatagtacctacctcacacatagtgttaatttctattagtggttctcattaagatagtattgttgttcatccctggttgttagccatcatgtatctgagttagagagtcattgattttagaaagtcccgaggagactatcaggtcaagcaacctgcctcctgctagacaattagctttatccatgagttaccaaagagggagccgaaacccagggaagctgaaagagctgttgattgtcaccctgtgagttggtgatagaaagatatctggaatcccagtagttgcccatttcctagttctgggctctgcattgcactagaatactgtgccattctaaatatgaaaaggcagtatgaccattgtgcttgtcactttccattccctagatgctatcttatatttgtccttatgaaatttaacctgtgactttcagatcacttagaaccttggttggacagtgttttctagtgttatttagtatatttttttgtcatcttctgttgtctttgggttcccctaaaagagctatactctgggtgccaggaaacttcacacatgactgtcttctcttcctcgacttccctctctacttacctttccagctcgtagcaaatcagaagacttctctgacacctctctatgtctaaaggtcctttgatattctcacatggcggcatgaatcacagtgtattttaactggccttttccttgtatgtctcctacaatgagctgttgaagcttcatgaaaacacaatctgttttactcagggcagttataattccaattacaaagcacatttcctggctcctggctaggaactcgatcatttttcgatgcttccttgctcaggactttctgattccttcttaaaacattttggggcatctccttctcctggtttttggaaacatattctcatactgctatgaaggtttttactgacatttccaacttctcttaaattgattcagcaaatgtttttccataataaatgtcattgatatgtcatcaatatggagagcaacaacagaatgcattgagtaaactcctcccctggaggtctgagaatctagattccagttctcacagagccaccaccttggtgaccttggacagtagaccttctaagcctcagtttccttatcccttaagtggggatattaatagaacccattctcagagatgttgccaagattaaaataaccaagataattcctgtagatgatttggcatagtgcctgccacgtactaagcaagagttagcctccgtcattatagtatgatcataaaaaatgaacagactaaacgaagtaaccagaaggaaagaaattttaattcttaaaatgtaatagtttcttggtttttttttttctgtgaaacacctgcatggcacctttttgttattcatactgttttgactgtggctgtcgtagattcttgttgaaagtctgagagactgagacttgtcattttgaacatggcatcagtggaacagcttatgattcaataattgcatcatcctggacaagcaccagtagaagtgagtcaggacatgtgataaaaagacattcattttgcccctcctccctctctgtattttctttgctataaaattattgatgttaagcccatagtactaatatttcagttcaattcataataaaatttgagggcatttgaatatattatctgttgtaaattataattttatatttgaccacagagtatttgaagtgggtcttttctttccccaaaattctattttaataactaaaaaatattcttaggagaagtattatttaagaacaggtttatattaaataacatcatttcactttcaactttctggtggtcaaaaaatatgctaatactaattaggatatgatacacatgttctgttagaacagttttggcagttagaagacttctcttcttgtgtttgaaagggatgttacttggggtagttatgagccatgtatccagatgtcctgaaaggaccagtggtagatgtatttctatttttgtcttttcttttttctttctggcattctagttgctgagtgactgacttttgttttcagctcttctcacaatcaccattgttctaataactttgcttaaatagaatgtctccttttgctataagccatggggccatttaccgttaattttttaaagtactgaaatgagaacctcataaattaaagaacactcctgattctgagttagcagatcctactaagccttttgcagatggaaatttcctttaaattggtttgttttcctttaacattccattatcctattgttcattctttggagctgtgatttgtttaatatatttcaggcttcttaataaatcaagtcatgtaagttattatttggatcatttcgaaactacaacagcttatcaaacctctgaaagaagaattttgtgtttgcccacagactgaagaactgattcagttttattggctgagctaccttcattattcatatttaattcctggtactgagggtgggaggagggagaggagcagaaaagatacaactattgggtactgggcctaatatctgggtgatgaaataatatgtacaacaagcccccgtgacatgtgtttacctatttaacgaaccctcacatgtatccccaagcctaaaagtttaaaaatatatatttggtaaatcaattgatgtgttttaaaaaatatcgccttttggccgggtgtggtggcccatgtctgtaaccccagcactttgggaggccaagccgggcggatcacgaggtcaggagttcaagaccagcctggccaacatggtgaaaccctgtctctactaaaaatacaaaaaatagctgggcgtggtggcgcgcacctgtaatcccagctactcgggaggctgaggcaggggaatctcttcaacccaggaggcggaggttgcagtgagccaagattgtgccattggactccagcctgggcgacagagcgagactctgtctcaaaaaaaaaaaaaaaaaaaaaaaatcatctttaaagagataactaacccttccccagaaggcagggccaaagtctaaggttcttccaggtcctttgtattccctataaattttagagtcagcctgtcaatttctatacacacacaaaaaaagcctgctgggattatgattggtattgcattgaaattaaatcaatttgggtataagagacttcaatttggggattgagtctatattgagtcttccaatccaggaacactgtatatctctccatttagtcagatatttagtttatttcaacaatattttcagatctttagttcctttcagcaatattttctcatttttcctgtaaagctcttgcacatcttttgtcccatatctattgtgtatatgtgttttgctagttattaaattatattaatataaattttattttccaattgtttgtcgcatatatagaatgttttaaaaatattgtgtcctgtgaccatgctaaattaactaattctagtcattatgtcttcattatctttctcttgaattttcattgtcttccccttctgggactccattcatatgtaaggccatttgatactgtctctcaggtccatgaagttctgttaatttttcttcattcttctttttctctgtgttcttcaactgaatgaatgccattaataatttggtatgtaatggctcacttaaacttccttttgtttttaagatatttctactctcagctgtgtctggaatcctttagtccggagccccaccaaccctcagcctagaaggaaggaggagaaggatagggtgaaaggaaggggagagcttctagcttcaggacagagatcagaacaaacaacagagcagtcatcttggataaggaaacttccctcaaacctattacttatatcctcagaaataagaaaaataatgcatttatcaaattaaaggattttgaaaaagggaacattcagagaataaaactaaactcttgaaagttaaaaggatgataacataaatgaaaagctcagttgaaggattgaaagataaaagtaagaaaatatcccagaaataagagcaaaaagacagcaatgtaaaataggggagaagataagagaattagagaaccagcttaggagttctagaaagagaaaatgtagacaacaaaaggtaagaaatcatcaaagactggagtaggggaggtcatgctatctgtttctttttctattttttattttgagttacatttttttttactgtgaaacaagcatatgtacatgagaatgaacaaaacaaatatgcagtcatgtattgcttaacaacagagataggttctgagaaatgcatcattaggcgatgtcatcattgtgcagacatcatagagtgaacttacacaaatctgaatggtatgtcctacagtacacctggaccatatggtatagctgttgcttccaggccacaaacttacagcatgttactgtactgaacactgcaggcacctctaatacatcggtaagtatttatgtatctaaacatagaaaaggtacaataaaaatacaatataaaagaggaaaaaaatagtacacctgtataggtgcttactgtgaatagggcttccaggattggaagttgctgtgagtcattgagtagtgagtgaatgtgaaggcctaggacatttattatatgaagtctactgtagtgtaaactctgtagacttaggctacactaaatttatagaaaaattttcttcaataataaattaaccttagcctactgtaacttttttactttgtaaacttttaatttttttaacattttgactcctttttagtaacacttagcttaaaacacacacattgtacagctgtaaagaaaattttatgtccttcttctgtaagcttttttccatttttaagatgtttttatttttaaaactgttactaaaaactaatacacaaacacacacattaacctaggcctatacaaagtcagtgtcatcagtgttcaaccttcacatgttatcccactggaaggccttcaggggcaataacaaacacagagctgtcgttttctgtgataacagtgcctttttctgatatacctactgaaagacctggctgagagtgtttgacagttaacaaaaaaaaaaaaggacaagaagtacactctaaaataatgaaaaaagtataatacagtaaatacataaaccaccaacatagtcatttattatcattatcgagtattatgtactgtacacagttgtatttgctgtacttttctataactggtagcacggtaggtttgtttataccagcatcaccacaaacataagcatggtgttgtattacaatgcacagctgcagctaagtgataggactttttcagctccattataattttatgggaccatcactataaatgctgtccatcattgactgaaatttatgtcgtgcatgaccatacatacaatttaatgaaaaataataataataaagctagcagtgtgtaattaccaaccagggcaagaaatagaatattgccaataccttggaggcctccagtatgaccatataagtttacaaatcctattttgttcctcctccccagaggtaaccactgccctgacaaatgtgatcgttgttttcttgtttttcttactacctatataaacatccttaaacaatataactcagtttgtatattttgaattccatgttaatagaatatcatatgtatatgaattttatgtgaatagaatattatatatgtcattttgcatcttgcttttttcattcaacattgtaggattcattcatgttgtagtgtacagctgtcgtttattcattgctgtatagaattatatcctcagagataagatatatggatgtttataaatcattccactattatgaacatttgactagtttgtagtttttatttaaccaaaaaaatgctgctgccaacattcttacacattttactgtatatgcacattaatttatttacaagtataaatttctttttgaatacatatctattgatggagttgctacatcataggacattcttgtctttgactttactggataataccaaactgtcttccaaaatgattacatccttaaactcaggacacatcttattgtcaaatgtttaatttttgtcagtctgatgggtatgtaagttattttattgtcgttttaatttgcatttccctgattactaattaagctgagtaacttttcatatgtttattggccatttggagttcctgtattgtaaagtataagtttttttgtccatttttctagttttctgtccttttagttgaaatccaaatttgcctaaatctgttattctctgagcacaagtaacttgggatgctttcctttagatttagcctaattctttatcattttgtcagcttgatggtgcttttaaggagatatatatgtgtgtgtgcgcacacatgtgcgtgtgtgtatatatatatatgtatatgtatgtatgtattttttgagacagggtctcactctgtcacccaggctggagtgcagcggcacagtcttggctcactgcagcctccacctcctgggttcaagcttttccctgtctcagcaacccgagtagctaggattacaggtatgccaccatacccgctaatttttgtatttaatagaaacagggtttcgccatgttgacaggctggacttgaactcctcacttgaactcctcacgtcaagtgatctgcctgctttagcctcccaaagtgctgggattacaggcatgagctaccgcgcctggcctggatattttttaaaaatattttttatctagcactttggtttttggcaggcaggttggcactcatagtctgacctaccatttctataaaaagaaacctgtaaatgttcttaaacagactttgaaccagtcttcctgattttgaacccctacctttacccccagtttttgagcctttcagaattttttttcataataattaggttgcttcttagctttccccactggtgacttaacagatcttaggaagccaacaatccttgtccatctgctttctgtcttgtgaactgttgctggtattgtctcttctctttattcttagaggtgtatgcttttaaaaacatatactgggtttgagagggagctgaaataaaagcatgtgttaaatataccatctttaaccagaactacatttgactggtcattttattttcaagctcacatacacttcaaacagagatatggctaaaggaattatcatgtgaacaacagccagggctctgaacatcacagattatatcatcatacttgaaatatttgaaattttgattcaaaatgagagctttatagctatgtcctcaatggactaagtgtttaagtacttaacatccaaaacattcttactaatcaagagaagacaaacaccccaacagagaaataggcaaattttatcaatagccagttcaccagatttgttttctgttagaagcgaatatggggaaatacatgtgtccatgttttgcctacttttcctggagcaggtaaggagaggcagtttaaggatccatgtgataaaccctaaagttgtccatcggctttccagtcccttctaggaatttaacttagggaaataatcagacatttgcaaaggtgtgtacagtggtatttataatagtgaaaaaccaaagaatgaccaataacgggagaatggaagttacagccaaatactttacaactactaaagaatcatgtaaaatatctattgacataggagttttatcaaaatgtgaagtatacagatgaatagtaccacacataaaaagcaaggtgcaaattagccatttatattgttatccccaaaataaatagatgcagtttttttaaaagatgcaggctatatatggaagtgtttgctggttttctgtcaaaagaatggcgactttattttctaatttaaactttttgctgttttctaaattgtctaaatagttatagtttttataatgtaaaagtatcttccaatttagcttcatttgacaaattaccttttcattctatctagctatgtaattctaaatgaatttacagcagtaatcttagagcagatgaatttacaacaataatcttagagtagactacggattagatgtaaaaacatgagttgggctttatggttacagagagttttcctcagtgtggggatcatagctgtattgagtttattcagttttcctttcccacatgaatgaaaaatggggccagcctacaactggaagggcctcggcatgtaccactgtactgtgtatgatgtgatttcttgatgctagtagggagagaatcaaattgcctcctattcaaaccaagacccacaaatagcgtcaaccagtcatttcagctactccctgcagtgtcaagaaggtgtgaacccctcatgttctctattgcatacccttgtctaattcagtgtttcttcttcttttcaggttttggctttatgctacatttcagaaatcataataaccttttctggtattattttattctttttcgcactgtgagaaaaattaaactttcaagtggatgcttcttataaactatttatacccttttgctcccttttgggaggcagggacagggacagagttcctcctcaggctaactaagaaaacttactgcttccaatgtaatttaaaagatctccctctttctattgctctctgtactcttaattcttttttttttttttcacagcagagacaagtgaacatttatttttatgcctttcttcctatgtgtatttcaagtctttatcaaaacaaggccccaggactctccagattcaattatgtccttgggcttggtcgactgctgtaggagtctcagggagccttctacaaatgctagagtgactcatttaccaacattaaaccctaggatacatgcaacaaagcaggactccttcctccatggaatgtgccgatttcagatgacacagcacccaatgtagaaaacgctggaatttttccttggaactagactgtgatgagaggtgcttgacatgaacataagctactgtcttttctttttttttgagacagagtttcgcttgttgcccaggctggagtgcaatggcgtgatctcagctcactgcaacttccacctcccaggttcaagcgattctcctgcctcagcctcctgagtagctgggattacaggcacgtgccaccatgcccggctaatttttgtatttttagtagagatggcatttctccatgttggtcaggctggtctcgaactcccaacctcaggtgatctgcctgcctcagcctcccaaagtgttgggattacaggcatgagccaccacgaccggccagctactgtcttttctttgacccttcctttccagtttttgaagataaagcaggaaataatcttctctgaagatacttgataaaaattcccaaaacaacaaaacgcatgcttccacttcactgataaaaaatttaccgcagtttgtcacctaagagtatgacaacagcaataaaaagtaatttcaaaaagttaagatttcttcagcaaaatagatgattcacatcttcaagtcctttttgaaatcagttattaatattattctttccccatttccatctgaatgactgcagcaatagttttttgtttgtttgtttgtttgtttgtttgttttttgagatggagtctcgctctgtcgcccagctggagtgcactggcgcaatcttggctcactgcagtctctgcctcctgggttcaagcgattttcctgccttagcctctcgagtagctgggactacaggcacgtgccaccacacccagctcatttttgtatttttagtagagacagggtttcaccatgttggccaggatggtctcaatctcctgacctcatggtctgcccgccttggcctcccaaagtgctgggattacaggcgtgagccaccgcgcccggccagcaatacagtttttagttactcgacatctttaagcctataactcttaggctatgcatagccccatgtcctaatcaggcattcactgatcccagcaggtctccatctatttgtaccagcctcctctttcctcccaatctcaaggttactcttaaatactagtaaatgcaaaaagaacttgtaaagtggcaaggcatggcctatcaaaagtcagcccaagggcagttttcagccctgcctcacctgggtctagttcagctgacggatgagctgattgatgcgttcaccccgatagccaggtgtgcccatctccttgaggaagcccactctatttttggtagcatgatgggccactgagaggtggaaagggcgcaagaaccatgagatctcctggaaatgcttccctgggaaggcaatttcatgaatgaggtcttccaagcaaatgaagccaaacttccccaggtgctcctcaatcactgtgttgtctgtcagagggatggtcttattcttgaccttggcttgtccacgtttcaaaatgagttctcggacagacttcagatttggaaatccccaggtcacataaggttccactatatgcagcatttttagattctagggggtaacttttacaaagataccactaaaaattttctttaggcgaagtcttgcagtggttctctgcacccgtaaactcacgccatcaatcctttcgatgcgtacaacaaaggccaaggaatgtttatctggcaattccaaggcatgaggtttcacttctagtcgtctgagacgcaccttgtcacgtttctgccgccaggaatcatgtaggaatgattccagtcgcttaaacctgagcccttttcctttcttctgtcttgctactgccatctttctagtggtgcagctactcaattctttttttaattataatttttattttaagttccagggtacatgtgcaggatgtgcaggttacataggtaaacatgtggccatggtggtttgctgtacctatcaactcatcaggtattaagcccggcatgcgttagctatttttcctaatgctgtcccgcccccccacccaacgggccccagttacactcttaatccttatagctcagatgttatgatccacagtgtggttcttacagaaagttatggattaaaaaaaaaaaaaaacactcaaagtgcccgaactttcttaaaataatcctggtacagctaaactcatgcactgactgtccacctaatatttaacagtctgtgttgtgatatattgttttaatgttctgaatgcttgtcagctttcagtattgaagatgtgaatcatttatcagcaatgacacatttagtctaaggttgtcagctatttatgctacaaattaatgacttgtccttaaaatatcaattttgtgattcatgttttggcaggtggttagatgttttgtgttctaattttaaactatggataaaggttttgtcataatcattgttttattggttccttttctcccctgcccactccccaaaaaaccctgcaattcttttttgttaaacttttattttaggttcagaggtacatgtgcaggtttgttatataggcaaattttgtgccacaggggtttgctgtacagattatttcatcacccaggaaataaacacagtacttgatggataggtttttagtcttcattctcttcccaccctcaagtaggccccagtgtctgtccttcccttctttgtgtccctgtgtactcaatgtttagttcctagttataactgagaagaacatgtggtatttggttttctattcctgtgttagtttgcttaggataatggctgccagctccatccatgttgccgcaaaggacatgatttcattctttttatcgctgtgtagaattccatggtgtatatgtaccacattttctttatgcagtcttctgttgatgggcttttaggttgattctatgtctttgctattgtgagtagtactgcagtgaacatacacatgcatgcgtctttatggtagaatcatttatattcctctgggtatatacccagtgatgggattgctgggtcgaatggtagttctgttttaagttctttgagaaatcatcaaactgctttccacaatggctggattaatttacacttccaccaggagtgtataagcatttccctttctctgcaacctcaccaggatctattattttctgactttttaataatagctgttctgactggtgtgagatggtatcccagcaccatttattgaatagggagtcctttccccattacttgtttttgttgactttgttgaagattggatggttttaagtgtgtggtcttatttctgggctctattctgttgcattggtctatgtgtctgttttgtaccaataccatgctgttttggttactttagccttgtagtagtttgaagtcgggtaatacggtgcctccagctttgttcttttggcttaggattgctttggctatttgtgcccttttttgattctatatgaattttaaaatagtttttttctaattctgtgatgaatgtcattggtattttgagagcaatagcactgaacccgctaattgctttgggcagtatggcgattttaacaatatcgattctttctatcccctgcaattctttgttgttgtatttaactatttttacttgtgaagttttttcagggatgattttgttgaaagtgacaactctaaaaattatgttggtaattaaaattttaagtaatgacttttattttcagagattccacttctcttagactttggagctgttaacagcagtgtccaatctgcagtggtactcagcagtttctgtttcctgcatgcagaactgcttatatgaaaacacagttttaaaaatgctttcttatggctgacattcacattcttattccttttgattcttttcaagagggatttggtttgttaaaattaatttttgcaatacttttatgaagatacaaactctgacaaagcttttaaaacaagtttgagagaatacagtattgatttcacttgtaaatctgacgattattttagaaaaaaggaaaatattatttactattattttgcttataaatgtttatcaattttaaagcttccacattgcacatctcccactacaacagtagctaccatttattctttctcaaaaaaagtgctaagtgtgcccttgaaatttttacattgtgcagaatatccctaaaattttaaaacaaaaattacatcatcacttgctttaaatgtttcttctttatttaacatacagtttctaaaatgttagcaaatagcattttagaagagacacgttacttttctaatgaatgttctaaaatgaaccacagtaacctatacttacttagactgtgaaaaacaaaacttatattctattgttaaattttcaaaagtgaaactacacgatagtttacttggcacatcactctgttattgtgaattgacaaatgtatatgtagacaaatatgtgaaaatcagagtacatatacattatatgcagcaccacaatacattttttagtatgttttgactgatatttaattatataatttaccaagaggatctcaccagaatgtagaaaagtattgaattttagaacaattcacatatttaaaaaaaatgtagtcagcccttttatctgtatctggagaatgcagggtaaaggaataatacatgagtattggtatttaaaaaaaggtgttaatttcttacctatgatacctgttactttgggtatcatttaacctttatttctgtgaaatagaggagttctaacatcctctaattattataatattgttctaatttaatctatcttaatctgtgatacagtttgaaaaccaagcttttactattggcatgtgcaaaaaaataaagcagcagtagacttggaatcttgaatgcaaatttagattttgcctcttaataaatgtataatatagtgttctgggaccaattctctaacatttctgagtcctagtttctgcatctgtcaaatgggattagagatacctactttcaggatgtgatatggtttggctctgtgtccccacccaaatcttatcttgaattgtaatccccatatattgagggagggacctggtgtgaggtgtttggatcatggaagtgatttcctccatgctgttctcgtgatagtgtgggagatcgcaaaacatctgatggtttaaatatggcagtttcccctgtgctttctctctctcctgccaccatgtaagactttccttgcttcctctttgccttctgccatgattgtatgtttcttgaggcctccccagctatgcagaactatgagtaaattaaacctcccttataaattacccagtctcagatattctttatagtagtgtaaaaactgactaatacagagaattggtactggcagggttgggtactgctataaagataatctgaaaatgcggaagtgactttggaactgggtaacaggcagtggttagaacagtttggagggctcagaagaaaactggaagatataggaaagtttggaacgtcctagagacttgttttgaatacttttgaccaaaatgctgatagtgacgtggacaatgaagtccaggctgaaatggtcccagagatgaggaacttattgggaactggagcaaaggttatttttgctatgctttagcaaaaagactggcagcattttacccctgccctagagaactgatgaactttgagatgatttagggtatttggcagaagaaaatttctaagcagcaaagcatcctagtggtgacttggctgattctgaaagcgttcagtcatgtgcattcacgaagatatggtctgaaattggaacttaggtttagaagtgaagcagaacataaaggtttggaaaatttgcagcctgaccatgtagtagaaaagaaaaccccattttctggggaggaattcaagccagctgcagaaatctgaataagtaacaaggagtaataagtaataataagtaaaaagtaataagtaataagtaacaaggagccaaatgttaataaccaagacaatggagaaaatgtctccagggcatggcagagatcttcggggcagcccctcccatcacaggcctgagaactaggagggaaaaatggtttcctgctcagggccttgctgctctgtacagcctcacgacatggtgccctgcatccctgatgctccagctccagctgtggctgtaaggggccaagttacagctcgcaccattgcttcagagggtgcaagccccaagctttggcagctttcacgtggtgttgggcctgcaggtgcgcagaagacaagagttgaggtttgggaacctgtgcctatatttaagaggatgtatagaaacgcctggatgtccaggcagaagtctgccatggaggcagagccttcatggagaacctctgctagggcaatgcggaagggaaatatggggttggatccctcatacagagtccccactggggcactacctagtggagctgtgagaagagggcctctgtcctccaggccccagaaaggtagattcaccgacagtttgcagtatacgtctggaaaagccacagaatgccagcctgtgaaagccacaggggtaccctgctgagccacaggggcggagctgcccaagggtatgaaagcccaccccttacttcagtgtgccctgaatgtgagacatggagtcaaaggagattttggagcttttagatttaagggctgcccagctgggtttcagatttcatggggcctgtggcccttggtttgaccagtttctcccatttggaacaggaacatttacccaatgcctgttccctcattgtatcttggaagtaactaacttgcttttgattttataggctcatacgtggaagggacttgccatgtctcagatgagactttggtcttggacttttgagttaatgctgtaataagactttgggggactgttgtgaaggcataattggttttaaaatgtaaaaagacatgggatttgagagggagcaagtgcaaaataatatggtttggctctgtgtccccacccaaatctaatcttgaattgtaacccgcatgttttgggggagggacctggtgggaggcagttggatcatgggggggttttttccatgctgttcttgtgatagggagttctcaggagagttgatggtttaaatgtggcagtttcccttgtgctctttctctctcctgctgccaggtgagacgtgtcttgcttcccctgccccttccaccatgatcataagtttcctgaggcctccccagccatgcagaactgtgagtcaattaaacctcctttccgtataaattacccagtctcagatagtatctttatagcagtgtcagaatggactaatacaggatagtaatgaagattacagaatatgtagatgaagaagtgctaagtaaatagcagctattattatgtagtcaaattgaatgtatacattgtggtacttcagtgtcctttaaattgaataactagaaatttgttggctttctcaatctgctcacatcagatgacatgttaatttatgcctatacttttttctagttaatagatataaatctattcactcaacttctattgacagaactggtagtgtggcaagacatctcatttctagttaaggctgtataatattaagttcattttacttaaattaactatggtttgggaaatgcttttcatgtcatcatgtatgcccaatttgatactttagtgggacagtatatttcagaaaaaaacaaatgcttccccaaaaattccagggttgaatacattagtcagacatataacaatgtacttcagagttcctctaagggcaaaaatcgtggtatgaatatacaaaacactcctatttatacttttgtatttttgaaatgtagtcttcatgttaatttagcatttcaatgaccagcatgacattatcttaataatttggaatgccaatatgttcatttaagacttaatatagtaagtatctaaagaaaaaaatggaagtgactgaatgcttttgtatctcttaattataatttgtgctccattgtgatatgaaggatagaaggggcaggatagatagaaaacagaaattaactttgatgtttaaccttaccttaagactgtctgttaagtgacccacataatcttaaaaaactctgtcaagcttaatggatgctactctgcaggcccctgccaggcaacagtcacaaggttatgaggtgcatagattttggaattaggcagagctgaattcagatccaggtgttgccttataatgcgactttgggcaaataaaaggcccaatttttgtattcttatctgtaaaatggactcagtaaaaattatttgagataatttatttgtgtactgtacctaggcatgcagcttgacacacagaattacaagtcagtagtttccagtatgattattattgtgaaagagatattttgtttcacctactgaaaacttttttcagtcttaaattttttatctaactggctgtattgcagatgtctgctatataacttttatataattttaaaaactatttctttcctccttgatcttctaggggtaaggttaccaatgttttcattatttactaaatatagcagcccccaccccttattcatggaggataggttccaaaacccctagtgtatgcttgaaaccacagaccacagataatcccaaatcctatatgtatattgtttttcctatacatacatacctatggttaatgtttaacctactaattaggaagagtaaaagagtaatagtaactaataataaaataaaacaattgtaacaatattccagcatcactattcttgtgctttagggccaccattaagtaaaataagggttacttgaacacaagcactgtgatactgtggcagtccaactggtaacagagatagtgatgcggtttggctgtgtcctcaccagaatctcaacgtgaattgtatctcccagaattcctatgtgttgtgggagggacccagggggagctaattgaatcacagggtctggtctttcccttgctattctcgtgatagttaataagtctcacatgatctgatgggtttatcaggggtttccccttttgcctcttcctcatttttcttttgccaccaccatgtaagaagtaccttttgcctcccgccatgattctgaggcctccccagccctgtggaactctaagtccaattaaacctctttttgttcccagttttgggtgtgtctttatcacaagcatgaaaatggactaatacagtaaattggtaccagtagagtgggtgttgctgaaaagatacccaaaaatgtggaagcgactttggaactttggaggactcagaagaagacgggaaaatgtgggaaagttaggaacctcctagagacatgttgaatggctttgaccaacatgctgatagtgatatgaacaataagatccaggctgaggtggtctcagatggatattaggaactttttgggaactggagcaaaggttactatgttatgttttagcaaaaagactggcagcattttgcctctgccctagagatttgtggaactttgaacttgagagagatgatttagggtatctggtggaagaaatttctaagcagcaaagcactcaaaaggtgacttcggtgctgttaaaagcattctgttttaaaagggaaacagcataaaacttcagaaaatttgcagcctgacaatgcagttgaaaagagaaacccattttttgagaagaaattaaagctggctgcagatatttgcataagtagcaaggagcctaatgttaatccccaagaccatggggaaaatgtctccatggccatgtcagagaccttcacagcagcccttcccatcacaggcccagagacccaggaggaaaaagtggtttcgtgggccaggcccacggtcctcatgctatgtgtaggctagggactttgtgccctgtgtcccagctgctccagctgtggctgaaaggagccaatatagagctcaggctgtgacttcagagggtggaggccccaagccttggcagcttccacatggtgctgagcctgtgggtacacagaagtcaagaattgaggtttgggaacctctgcctagattttagaagacgtatggaaacacctagatgcccaggcagaagtattactgcagggcagggctgtcatggagaacctttgctagggcagtgcagaagggaaatgtgggattggagccctcacacagaatccctactggggcactgcccagtggagctgtgggaagagagccgtcatcctccagaccccagaatggtagatccaccaacaacttgcaccatgtacctggaaaagccacagacactcaatgccagcctgtgaaagcagccgggaggtaggctgcaaagtcacaggggcggagctgcccaagaccatgggaatccatcttttgcatcagcatgacctggatatgagacctggagtcaaaggagatcattttggggctttaaaatttgactaactcactggatttcagacttgcatgggccccgtaacccctttgttttggccaatttctcccatttggaacagctgtatttaacctgtgacacccccctaccccctgccccccatccctccggcccttgtatctggaagtaactagcttgcttttgattttataggctcataggcagaagagacttactagccttgtctcagatgagactttggactgtggacttctgggttaatactgaaataagctaagactttgggggactattgggaaggcatgattggttttgaaatgtgaggacatgagatttggaggggccaggggtggaatgatatggtttggctgtgtccccaccctaatctcaacttgaattgtatgtcccagaattcccatgtgttgtgggagggacccgggggtgggggtgcagtaattgaatcatgggggctggtctttcctgtgctattctcatgatagtgaataagactgacgagatctcatgggtttatcaggggtttccaaaacttttgcctcttcctcatttttctcttgccaccaccatgtaagaagtacctttcacctcctgccatgattctgaggcttccccagccatgtggaactgtaagtccaattaaacctctttttcttcccagttttaggtatatctttatcagcagtgtgaaaacaactaatacagatggctagtaagggactaaccggcagggagcgtctccagtgtggatatgctggacaaagggatgattcacgttccagggcataagatttcattactcagaattgcacagaatttaaaacttattaattatttctggaattttccacttaatgttttcaaactgtggttgactgcaggtacctgaaactgtcaaaagtgaaaccacagataagtggggagtcctgtacctaagattattcctttaaattgtttcagtggatatgtagggacctgagtgtgaagtgagagcagcagcatcaaaacctgagggaaatccagatagcaaaagaaacttgtctagtatactggcatgacagagaaaccaaaaagttctcaagttaatgtgagaatctaagaattaaagaattaagcctttgcctttgagggaaggaaaggggtaatgtggctttaaatcaggttgagattggttctgagggttccttttccttcctttatattgatatgaatatagacacaactgttctgcatttccatttgtttttataaatgtctttttaggatttaggaactgctaattatgcaatatgagatatctgttagtttgaggaacatttgaaaatttggtcaaatgacacagatcgtcacacagttttaagacaaatgtttttacctatttgacctagtctggcaatccctatttgggcaaaaatcttcatttgcaggtcatgattggaggcaggcacagaaaaaaaattgccaccttttttgcattatgtcatcaagacatcaaacttcagcctacaaagtagaaagtgttatttctcaagttgaaggcctggatatacctcagcttctcagttctgacactttatcatagtggaaaatgaagaagattgcttaagaacactgatgttggtgtcagaaagacctgggtttgaaccctgactttactagttacttagatcactttaggcaactcaacttttctaaatcttgtttcttcatctgtaaatgctgaaaatagtacccacctcttaggtctgtggagaggattaaatgagataatctatacaaagaaagagcttgcataatagtgccaagtaatggtgaggttatacctgtattctgattataatctcataaatatttaccatgttagctgtctcagagttcttttgcaaaacagataaagatagaaagtataaataagaaaaataagtgaacatatactgaactttgtacaagatgctggcgatatggagagacccaagacatgggccctacctaaaagagattattgatagaaacaggatacatatacatcaaaaggtaacataggatcatctgtgcaaagtgctatatggcagtgttttaggaagtctagaagctgtcatggatcaggaataccatggtggacacttcaggcagggaaaacagatcttagcaaaagctactcctatcataggtacttgataaatatttgtagaatccaggatccctgtagtgataaagaaactacatggattatgtaggggagtgataagacatatgactggaaaaataaaaagaccaaattatggaccatactgagcttgtactataaacagtggaggagcccttcagatttttaatcatgttgagaaaagagttttagcagtgtgtgggggatagaatggaaagagaagccagtgccagaaggactacttagtatcaaccattgcagtggttaaagcaagaggtgagagaaggcatgcattagaatggcagcggtcagagtggatgggaaggaataggtcctgacatagtgttacagggagtaataaataggatgtggaagatgggttagaattggcaaaatctctgcatgtaagtctgggttactaaatatagtgagagaaattcaaatctctctttaagaatcgaataaaatatttagaaataagttactgttgtatttgaggtgaacacaaatggcatttcaaagatgctcgagataccttgttggaaaaagtcaataactgcactattgtctccaacatgttcttgccttctctgaagacatcatgttcctaattctgaattatgaaccatctattatccttgtatgctcttatgtgtgaggaaccataaggtgggaacaaaatccggtcttcattctagaaataactatgcgatcaaaaagtttttagtctttcttcttaccatactggttcttggtattctgtttaccattcaatgtactattattgcttctgcttaaaactcgcatcccctaatgcaagcctgagcaaacagaactgataacacacagcctgagaagggagtgcttggggtctcaagacttattctgtttttctccatctttgacacttggtttgaagagcaaagaaggatacagctgttaggaagtaagttacccaaacacagtgaccaaactggattaattcttccaatgagaaagaaatacattatttctgtgagacagattagactttaagtagcatagataacatgattatattctctctacaaataaatacacaggacctaagaaaccctttacagatccaagtgttttcctctccacttttccatccccaaacccatcttgcaagatatggccagcttatttggagttaattaaatcaagaccttcgttttacagacagggaaaccaagcccagagacactgagtagtaggccactggtgtcttagaggtctgaaaaatcctttactgaacattctcttgatctattaatgtataggttttgttgctgtaaccctctccccaagaggagtgaatataaatgatgcagagtttggatgaactatcttaataagaacctaaagttgaaaccaatgcaaacctctctcaataaatgcaaagcaaagagaataatcagtctttctttggcttgttaaataagataaaatgtgttctgctaaaaccatttaacagaaatattgtgaaaggtttcccctaaagcatttttctatttgatttgaaaactattccatagcttattatcaaacaaatcagtaattctttagctaatgcagagataaatgggcagtcagaaaatataatcacctggtgtgtgcagctgagtatttacatttttcctaatgaacaaagataagaaaagtgcaggtgactttaatgtgtaaaaactaccttttagtgctagcgctagagggaaaaagaaattactggctcaagccaatcctgtacttgataactaagccgtatagtccatggcttggcttcagttctgttttgaatctctttttggacttgtcttgaatggactgtttagggctgcttcagtagtgcagttgttgcatttttaagcatagtttaggttttaaaatgtttctggtccctttttttttttcttttccactttatgttgcttaaagctttatggccaggttttctcatcctcagcattattgacatttgaagctggatacttctttgtggtgggggctgtcctgtgccttgtaggctggttagcagcatccctcgcctcttctcacttagatgccaatagcatttccccaaccgtgataaccaaaagtgttttcagacactgccaaatgtctcctagagagcaaaattgctctctgttgagaactactgtgttacggtgtttggacaaaaactgacaagccaatgggaatattctattggtagttgtaaaaaattaatccagttatagcagctgtatttctggaatttttttccatattaacacttgctttctgaggtgataatatctttgttttttttctcccaaatagatttcttgcattacactgaaaaattgctgattaattcacttaaattgaagactaagccaatcatgtcatttgggtaatagtttaccaactctgcccctttctctgtcagggaagcctctaatttagtaagcgatactgtatccttttgtcaggtacattaccattcctattagcaatagggcaattgagattgagaaagattaaaaggtcaccaagctattacattgtagaattaggttatgaattgtagcctatctggtttagaatctttaccttactagtctccataacaacaattcttccagtgtggtccatggggccctgggagtctccccttaaagggcagactattttcacagtaacacgtactttatttgccatttcattatgtcagcatttgcaataatggtacaaaagcaaagatgagtaaaactgttggcatcttagtatacagtagttactgtattcactgtcatgcacttaaaatctttgaagaagcaaaaaaattattaattacattaaatttcaacccttaaatacatgtggtctttctcatgtcagtgtgacaaaatgagaaggtgcataatccacttatatcgcatatagcatttgatagttgtctcaaagaaaagtgtataagattaaactgtgagttaacctactttttttcatggagtaccatgagagataaactctggttttcagccttgggtatttggcgatgttttcccaaaaatgactgaagtaaacttagcactttaaggaaaacaacttaaagtatttgttgccaattgataaaatataggtttcaagcaaaaatcagaatttttgaagacttgtatctgccactgtgagcttgacaaatgtgactcttttatattacataatgaactatgtcaacatttgaaagatctgcataactcagtgaaccagtattttccagatgactaatgcatgataatacaaaatcatgcatgggtaaaagatacattcaaagtgcaagatagactgacatatttcaatgtaacaatcaaaagttcattgataacagttttggattccacattgcaatactaaaacctttaaaaaacgaaattgtccaattttggtgtagtaatcagaaaaggcaatctataattacctgaacttaagtttctggaggaccattaaccttctacaggctcatggggaagactgtagcacttctctttccctaagatcctccagaaaggaagaaggtaatccttgggggtagggtagagacctattgtgtgatgatcaccaagtatgtaacaatgctttatataactctaatatatataatccacacaaaccccctaaaatggcactaataagggaatggactcaaagaagttaagtcagctagccactgtcacagctattagagcactggaactaggatttgaacccagatttgtctgtatgtaaagctgattctcttcgtaatagtactgagacacaagaggcggctacaaaatattctggtactccatcctagaccagagtttcaaggttcgttatcatttgtagcatgatactggatcctcacagtgcttgcctttcattcaggtgccaggaaacgtctgcctgaatgaatgggtgtaatttacctgcacattttacatgcttctctaggtgtgtgattaactcataatccatccatgactttcacccataatcctccttgtagcaattgctttgcttgcaacaaaactaagtagacatatctagctttatgcatggttttctctctctgaactctaacataaactcagcctcaggaattattcggtttctactacatttgccattctgattgggaaccaccagcattcaggtattcacctggaacaaggcattttgttccaagggttcctcacttaaaagcaagcaccctagcaatagttcataatggaacttcttaacattctcagaatgtttggcacagctgtgagtgaacacacattgagcaatcaataactattacagataatgatgcccttaagaccaggatattttagctttcccattcaaagggggtgaaatatgcactcttactatggtatacttttggttccttctgccatgtatccttaataaaagatgtcaattccatatggttttctcttgagttctaaccattttgttgtaccctagcccttttaacaatatcaaacttgcaactgaataccatttagcattcatccattttttccaatggtgttcattataggctatcttactcctcctatttgtatgacaaaaattggcttttttcaccgatgtctatggtacatctggcagctttccatgtactcagttcttatctgatgtagcccagaacgactgcctgaagggatgccaaaagcctgattgaggttccaaattttcagctactgtactatcaatccatttgttcatttttactttcccttgtcatctgtagcttacagttgagtggcctgaacatgttttgcatacattgtaatatctaagaatttgggaatacggtcctaggatttagacttaatactaccttccatttatataatacttactcataaaatcttcagtgttcctgaaaaagaaaaaggaacatgtattgagtgcctgctagaagcaggaacttgtagtagattttctatgtgttaccttattttcacaacacacacacaggtgatatccttcccagtttactgatgaggaaactcaggggtcaaagtagtagatacctacccaaggtaacagaagctgtgaagtggtacagctgggatctaaaatatgtcagcttcaccgtagataggctccctgatgaaccacctgccacggcccgtatgaccgcatccaggggtgatgatgtcattttcacagggttattgagagctaaaactacgaagtactacaaactattatttaaaatataaatacatactatatatgcatatgtgtgtatatataattaatggggtaaacattacagaatactgtcctaacctttaaacaatgcactcgttttctgtaaactaatatacaaacaactgtttggtccctaaaaatagatgtcaggtgacagagactggctgagcaagaataggagtatcttcagaatagaagccagaggagtttttgcttccccaacacattgtcgcaccattcactgttccaggaccttcctacttctctggaaaactctggcccaaagcagctcctctacattagtcacaagtttccattaatcaggggtggcctgtgccggacctacagcagagtcatttcaggttattctgttacaggctttcgacgtgtagtcagtccactcgcccaaatctagcagggaatgaatgccttgtaatacggaagcatctacaaattcttcttaacagtgttcagagaacaatgtgaaaccctggggccttttcccagaattagggtggtgggaatgctgtcctattgactaagcctgttaggtaagcaggcagttggcaagattcaggaagcttcatttgaagatagaatttagggcgatcgtttggatttactggcttaattacttaaggtaacatttataaaagaaattgtcattccattattattaccttttaacttttattcctaaacggaacattagcaacaaactacattacttgataaatgtaatttctaaccagattgataactagaaaaaaattttaagttactttgctctgtgaattagtttaaacatatttgtaattgagacttactactgttattggctgaaataaataaaagcaagagataataaagaataacagagacaacgaacacccaatttaagtttatttctaagttccatcttttttagagaaaaggcaaattaagaaaagtttagagagaggtactagtatatttatgaacttgtatagatgataagcaaaacggactttaatatgtagaattccagaatcaacaggttgccagcatccatgtttttgaagatttgcttaagaacacaaccaaaaatggaatgggcagtctctaattacaagcagaaggctacaaaatcattttagctgcataatacagttttggttctaaagtcagcacgtaagaggaaaattccttaggaaaatacaacattgaaaaccattgtgtcatgtaatatgaaatgcaataattaatttttcctccagtaatagaaagatcactgtttcattggtttataaaaatatatctttatcattaaatgtggcaaaatgttaagacttggtgaatattggtgaaaagtatatatccattgtacaattctttccaattttttttgagattgaaaatttttaaaacaacaaattatcttttaaacagctaataatcactagacctgcactctttgtggtgagactatgaaaaatgttagagacctagtaagagaagcagattcacatttctgtcttcttcttcaagccaaacagtcatagagtggagtgggcagaatggaactcacttttgaaagcctagtgctttgtccaatcttactgcaagccagacaggaaggttatagaaaatgtttctggatcagtcttctctgagtcatatgaaattgtggtttcagccaagatgacattaggaattagagacatgggacaaaaactttaagattgtaaaaaaattttgactctagtaggaaacatgggtagaattgtaatgacacttgattgaattttaaaagatgcctgtataagatcttaaaattaggaaaaaaattatggcctaagcaattaaaggcataggaggcatctttttgggatgatggaaatatcctctctcctgattgtgatagtagttacatgaatattcatttaacaaaaaccataaattatagacttagaaaacagtaaatgttactgtatgtgacaccttaataaacgtgattataaaaataaatcctaagcatctaaaaaaaaaaaaaaaaagaagaagaagtgaaccagaaccacaccattctattttggagacacttcaaaagaaatgacctcattcttaattttgtttaaagaagaatataacatgatttgaatatatttagctaggatattttagtgcctgctagcacttgaagccagagttcactgtgagcattctgactatgaagtgagaagctaagagaactgtattttgatattcctttgacagttaaatcataacactgttcttccccttctttagccccagcatgagaccagatgtaagctctcctccatccagctcctcaacagcaacaacaggaccacctcccaaactctgcctggtgtgctctgatgaagcttcaggatgtcattatggagtcttaacttgtggaagctgtaaagttttcttcaaaagagcagtggaaggtagtgtgtgttttgaagagtttatttttcctctacttggttttcatttctcagggtggattttgaaatttccattatatgcaaagcccatgaaaggctaaatatcagttaagaggggagaggagggtggctcctaggtcctctaatgggcaggaaagtatttaaaacaacaatacaaaaagatctagaataaaatagaaaagtacaagttgatgtctgggagtttggtcagggagcataaggtaacactataagaaagtgctatcatatgaaatgatggtgttaagtttgggcataacataatgttcattgtattagaaacatgggctttaacttccataagctaataggtttcaaagtcaccaactttactggcctggcaaaaatgagtcacagtgagaactgtgacaggaaaaaaaaaagatattcatttcatttcttattcattttttttttctattaagccagggcactgtgctaagtggtataaataccaataagacctgatccttaccctctgggaagtcacactccactgaagtgaaagatgagttaacaatgacaaggtacagagattataatatagatgagggagagagaaactcggcctgaggaggtcaggaaaggtattttagagaaactgatttcactatataaatgttgtattaacacaaatcttactttgttatggattcagactgctgacagggcaacagcattatctccctaaagaatgagaaattcattccatagcaaatttattagaagagagtctaaaatgtcctaatactaccagtgactcctctaggaaaaaaattgtcatataatttagttatttctaaagcagtttgaaagtagcttggcctaaagctctgattatattaattttttaaagaaacaattattcattcactgtatgaggattattattatttgtctcatgttgtgtttgcatatccatgagagttagatgagtcattttcttttgttttactttttaatacattagcaaattataaaattactcatattacaccacaaagattacaaggatggcagctttggccagtgtagtagtcccacctattgattagagtcaaaagtaaagcccagccctgctttgtgcattgctcctaataaagtggatgttacttaacacatacgcagaagacagaagcgtcttcgtgtcctcactttactcctcactttcttaactgcttaagtatttccacgatataaatgcagtgataataataatacggacagtccctgacttaacgatttttcaacttttatgatggtgggaaagtgatacgcattcagtatggctcctcgacttacaatggggttgcctccagataaacccattgtgaattgaaaatatcttacacttagcactccattcttaatacctgctagaattatagattatccctcaaaattggcatagtataatatgggtatcagcaagttgttgcactttattcagagctttacactaggcaggggtgggctttacttttgactctaatcaataggtgggactactacactagccaaagctggcatccttgtggtctctgtggagtaacgtgagtagcattataatttacatcccccataacaaatgatccaagagagtatgtgatcaatgcagcagaactattgtcttttattatctgatttcacatgtaacatgccatcacttctgccatattttattggccacacagaccaatcttggtaaaggacggaaagggactgcacaagaccatgcattcaaggaggcagagatcactgggggccatcttgggaggctggctaccacacccaccataaatagaaaaccagaattatttgccaaaaatagactttaaccacaaaaatgaataccatataaacaaaacaaagtcacaaaatttcagctgacttgaagactcatctttctattagttagaaagggaatttaccaagtagtagaagacacaggaactccaaaataagatatctcattgtcttatcagaagggttgacaggaaaatgggctgggcactgtggctcaaggaaaatgggctgtgcactgtggctcacacctattatcccagcaatttgggaggccaagatgggaggattgcttgaggcctggagtttgagaccagcctgagcaacataacgagaccccgtctctacaggaaaaaaaaaaaaaaaaaaaacgttatccaggcatcgcacctgtagtctcagctactcaggaagctaaagcaggagattcaggctgcaaagagctatgacacaccactgtactccagcctaggcaacgtagcaagaacttgtctaaaaataaataaataaatgagtcaaggaatgaatgaatggattgacaggaaatgactattagttgtacgtggccatgtgttatgaaatagtgaatactagttaaaactcctcattttatagataaggaacagatagatagacttgtccaacttcatgctaataaccacaaagggctatttttaacttatgaaggtacattgcctctgatcctatagctcagagtcttagctgtgcacaagacatacctgggataaagaaatcaagattggcgtaatgtgcacatcctgacatttcagttggatataaacaaaactttggaatttttcatttttagcagtgggtgattttttttctttttttcttccagtaactgtaggacagtgatttagagattccttatagggtataacttttttgtattataaccacttcatcaatagatgtatctgttgatcgtacttttgatttataggggatagaattgggttagtgcttccattttctgtccaagtaaagaagctaggatatttatagagtacaaaaagaaattgaaacagctggtacagatatttggcattggagagcagctctgaacaaaggtgaattatagtctagtggtcaattttgtggcctattctttacaaagaattgaacctgatacagttaaccatctaccccaaactattatttgtttaaaacacaatctattggctgggcgtggtggctcatgcctgtaatcccagcacatcgggaggccgaggcgggtggatcacgaggtcctgagatcgagacaatcctagccaacatggtgaaaccctgtctctactaaaaatataaaaattagccaggcgtggtggcgtgcacctgtaatcccagctactcgggagtctgagccaggagaattgcttgaacctgggaggcagaggttgcagtgaggtcatgccactacactactacactcccagcctgggcgacagagcgagactccatctcaaaaaaataaaaataaaaaaacataatctatcaaactgtgtaaaacacagtttatcaaaaaagtagttacccttggtgggtactggctggaattgggcagaaagggggcctgttggggtactgttctgtttcttgatctgagagctgattacataaaggttcttggtttgtaaaaatttattaaatggttcactgatttgtgtactttttttatatgtgaatactgcaataaggttttttattgcactgttttcagtttgttgaacagaaaaagggagactctttttgttgtttttgacctctcgacctcataatggcaatgtaggcaagaacattccctcaaggcaatacctgtgggtgtcttggttatattccaccggaaacaaagacagaggctgtccttataaaatatgtttgaagacctgtgaaactttaatagtgccttttattccatataggacagcacaattacctatgtgctggaaggaatgattgcatcatcgataaaattcgaagaaaaaactgcccagcatgccgctatcgaaaatgtcttcaggctggaatgaacctggaaggtaatataaatatctgaaagcaattgtttgtctctgtagcttataaaaatttatcattttacttttgaagatacacgtaagcagatgtaattaatgtagtcagttcagtatatatatgcttgactagcataatgttactgcccaataaaaatgggaaatttttttcatgaatatgtcatattgtttgtttatccaccagttcttcttacacacactgaattcagtacagccagactatatacaaagaaaggaaattatgtaataatgaaacttacacaacatgcagcaactttattattcttactccttttttcagcctcaaaactattccctagggttggaaatgtttctgtatcagacatatttacatgtccatttttctgtttgccttttaaaagcataccttttacttggagatctgtgttttattacagatcttcaagcggggggtggtgggaaaaaaaaaacctcaaggaagaactggatgggttttgttttggttttcaagtaaagaagaaacctgggccgggtgcagtggctcacgcctgtaatccccgaagtttgtgagaatccttctgtctagtttttatgtgaagatattaccttttccaccgtaggcctcaaagcgctccaaatatccacttgcagattctataaaatgagtgtttgaaaaactgctcaatcaaaagaaacgttcaactccatgacctgaatgcacacaacagtgagaagtttctgagaaagtttcttggtctccccgcactttgggagaccaaggcaggcggatcacgaggtcaagagatcaagatcatcctggctaacatggtgaaaccctgtctctgctaaaaacacaaaaattagcggagcgtggtggtgtcacctgtagtcccagctactcaggaggctgaggcaggagaatcacttgaacccgggaggcagaggttgcagtgagccgagatcacaccactgtactccagcttggcgacagagcaagactccgtcttggaaaaaaaaaaaaaaaaagaaacctgaaactagttataagttagagtttcatatccctgtttatataacaagttgtataattaacactgatctcagcattaaaaaattttcctctgaaaaaagtttggaattctgctgtggttgaaattgcaagttctgtgaaggtagtggtgatctcataacacatatgcttagtatttattgtgaaattagcacttttattcaacaaatatgcaccaacaaggcagtcactaggtataaaatgaataaaatagtgcctgtattcaagtagtttatctgctagttaggttgcagagtcagtcacaaaatagcatggcacaccatagagggcatagggccacaggaacaagaggaaggtcacctaattctgtcttggaagtcaaggaagaagtaacattgaattttaaatctataagctgagtaggaattagatagatgaaaaataagggcagagacatgatcagatttgtattttacaaagactaatcttacatggagagaccaattaagtgaatatggcagtcctccagataagagatggcagtactgagagagaatggaaaccatgtggttccttttatgattatgatgattattattattttagagacagagtctaactcttgtcacccaggctggagtgcagtgacatgaacatggctcactgcagccttgaactcctagactcaagccatcttcccacccagtagggctacggatgtacactaccatgcccagctgatttttttttaatttttgttttaattttttgtagagacaaaggggtcttgctatgttcccaggctggtgtctaactcctggccttaagtgatcctcccaacgtggcctcccaaagtgctggtattacaggtgtgagccactgcaactgacctatgtggttcttttgataggagagactaattgttggtgctatctagcacacactgtgtgtagacatcttgttaaatagaaaatagatttatgggtatgactatgaagagtctaattccccaaaccacacacacaactctatctacgtttgaccaggctatttaaacttaactgcagagtgtcagcatgttaaacattgatttacataaaatgatagctgcccactttcttgtaaatgttataaaaactgtagagattaactaaaaaatgcacacagaagtttgctttcagttccacaagggtagtttatttttgttataaaaacagtattccccactttcttagataccagatctctgcccagattttacccagtttcatcttgctgctctctaatctcctatgtatgtaatatactttgaccatttaaatatgtattaagacacttgagtttttagtgccctttggtttattttctccggtcccaattatctctaatcttcattttttcattttacctattttatatttcgaaataggttttgaatgaagctcaaaggacaaacccaaataaaattctgtcgtatctctaatatattgtggttgcttacccagtaacatttttaggtgcttttctgaatacatataaagtttaagatctttggagttttaagtatataatgtttttctgggcaatttctccctatccaaactatgagggccttctttcatcaaaagaaaaaagatatatcaactacaaagtaatgattttgatggactaggctacgaaatctgtccattttttcctccttcttacagtttaatagcaattgcagtgccctttgcccttactgtactagaagacgaccccaggcagtgactgacatctgatttttctattaattataccatcactgccatttccagttgaatcttttgttggacatcagaaatttttcttacatgaataaaatttaagcatacggttgggcgcggtggctcatgcctgtaatcccagcactttgggaggcctaggcaggtggatcacgaggtcaggagatcgagactatcctggctaacacggtgaaaccccgtctctactaaaaatacaaaaaattagccaggcgtggtggcgggcgcctgtagtcccagctactcgggaggctgaggcaggagaatggcatcagcccaggagttggagcttgcagtgagccaagatcgcgccactgcactccagcctgggcgacagagcgagactccgtctcaaaaaaaaaaaaaaaaaaaaaaaaaaaaaaaaaaaaaaaatttaagcatacaatttaggctgcagtttctcaaaatattgtattaaaaataaccaattatatgcttttatagtcagtataacgtatccagttagtgtagaaattggcatttgttgaaaactactacatgttagtctttgatatacattcttctactttttggaccctgattattaaaaacacctttgaatagggccatgatttactttatatccatttttatactacatagtggaagaaaattctgatttgttatttcctactatgatatgtaccgtgtggcacatatcatataaatgatccaattctacttgtagatgaattgaaagaaaggcttaaaaaagttcttagggtttgtgtgtgtggtttcactgtaaaactatcatttttgtattgaactaacctcagtatacataaaatctttatttggcctggtatgtacgtatgccaggaatctttggcagaccctaacacttacaatacagatgagccatgtgtttcacactttttttttaacaaccttcagaaatattctcttgttcatcagagtgcttcccctaagccaagcagtttcgatgatagccccagaataactttgcccaagtctctccataaatgtaacttaggactccaagtggtgtatttttatactcttgccccataccaagtaaatctcaagatttattttaagggagtggccttcactgcttaaagggcctagcatttaagaacagataagatttttaatggtgatcctaaatgtttttttttaaaaaacttgcttgtttttctcttgaaactaaatgtttttattcacttcattttaagatatattgtaatcaatccaaagtatggctttatttttagtataaacagtcaaatgaagcttagtcttgtggcattgtcagatttataaccaaatattactgaaactaatttttttaagttcaaaaacccaatctagtagtttctctcttattttcaacttttattttagattctaggggtacatgtacaggtttgttactaagatacattgtgtgatgccggtgtttggagtatgattgaacctttcatctaggaagtaagcacagtacctaacaggtgctttttaacctgtgcctcccttcctctatcccccctcttgtatttcccagtgtctgttcccatctttatgtctatgtgtactcaatgtttagctcccatttataaatgagaacatggtatttgtttttctgcattagttcatgtaggatactggccgcctgctacatccatgttgctgcaaaggacgtgatttcattctttttgtggccacatagtattccatggcatataaataccacattttctttatccagtccactgttgatgggcacctgggttggttccatgtctttgctattgcaaaccatgctgcagtgaacatatgggtacatgtgtctttttgatagaatgatttatttttctttgggtatattcccagcaataggattgctaggttgaatggtagttaaactcttaattctttgaagaatctccaaacttctttccacagtggtgtcattgtggttttgacttgcatttctctgatgattaacaatcagcatttttccatatgtttgttggccacacgtatgtctttttttgagaagtgtctgttcatgtcctttgcccatttttaatggggttgtttttgcttgttaatttaagttccatataaactctggatattagggctttgtcagatgcatagtttgcaaatattttctcccattctgtagattgtgatagtttctcttgatttgcagaaactctttagttaggtcccattgtcaatttttgtttttgttgcagtttcttttggggattagtcataaattctttcccaaggccaatgtcgagaaggttatttcctaggttttcttctaggattttcatagtttgaggtcttacatttacatctttaatccaccttactaatttttatatggcagtaggtaggggtccagtttcattcttctgcacatggatagccagttatcccagcaccattaatggaatagggagtcttttccctatggcttatttttatcaactttgtgtagattacatggctgtaggtgtgtgtctttatttctggactctattctgtaccattgtgtgtggtttttttttaccagtaccatgctgtttcggttactatagcctgtagtatagtttgatttggggtaatgtgatgttgccaactttgttctttttgcttaggattgctttggctatttggggcattttttggttccataggaattttagaatgctttttgctaattctgtgaaaaatgacattgtagtttgataggaatagtgttgaatctataaattgctttgggtagtatgaccattttaactatactgattctaccagtccatgagcatggaatgttattccatttgtttgtgtcatctttgatttctttcagcagtgttttgtagttctccttgtaaaaattttaaactaacttagatgcattcctaggtattttactctttttgtgactgttacaaatgggattgcattcttgatttggctctcagcttgaacattactggtgtatagaaatgctactgatttttgtacattgattttaaatcctgaacctttaccaaagttgtttatcagctccaggagccttttgacagagtcttcagggttttctaggtatagaatcataagtgaaaagagatcgtttgattatttattttcctatttggaagccttttatctctttctcttacctgattgttctgactaggatttccagtactatgttaaattggaatggtgacattgggcatccttgtcttattgcattaaggggaatgcttccagcttttgcccatttggtatgatgttggctgttggtttgtcatacagggctctttattactttgaggtatgttccttcaatacctagtttggtgaaggtttttatcatgaagagatgctggattttatcgcaactttttctgcatctattgagatgatcattattttttttgttatgtggtgaatcacatttattgatttgcatatgttgaacgagccttgcatcccagaaataaagcctacttgattgtggtgaattaactttttgatgtgcagctggattcagtttgctagtgttttgttgaagatttttgtatctgtgttcatcagggatattggcctgtagttttgttgttgttgttgtttctctaccaggttttggtattagaatgatgtttcccttgtagaataagttagggatgaggccctctttctagattgcttttttagaatagttttagtaggattagtaccagctcttctttgtacatctggtagaatttggctgtgaatccatctggtcaagggctttttttaattggtaggttttttattattgattcaatttcagaactcgttattggtctgttcagaatttcagtttcttcctggttcaatctaggcaggttgtgtgtttccatttccacatacatacttactccaaataatggctttatatatacgggggtcagctgaaaacaaaaatgatactttcatagtaaactccacccgcccccccacccacatacacacacacataaaccctagattttttaaagcctttgttccaatttatccatttcctctagattgtctactttgtgtgcatagaggtgcttgtaatagtgtgaagatctttttcacttctgtggaatctcttgtaatgtcatcttttacattttttattgtgcttatttgggtcttcactctttttttctttgttaatcttgctagtggtctatcaatcttgtttatcctttcaagtaaccaacttttataaactaggttttaagctaattaagatttctctactttcattaagaaggaagtagtgttaccacagactcatgaacacttctgtggagctcctgtattgactgctaatcaactatatgctccaatgggtcaggaatttatataaagttgtattaactaagttgctttaaaatagtgattgcttaactaaatgattcagttcagttaactccttcctgaagatattttgaaaaattaattagtattatttcttgctctagtcagtacagcacagttgggttcaattgtactttctgagctgtattgaaaaacatcagttttctcatttagaactatatataagtagtgagaaattaattacaaactgagtcatagaaaatgtttttttttaatcctccagcttgttactctttcttccttgttctaatgtggagtaaagaaatatgcattccaaaccatttaaagttatgactaattgaggctgtcaaagtactgtttcagtgtattgatttggcacatgtgtgttctcttttacattgtcaacaaaagtacattttatgattttggatcaagatttcactgagatacttctggttgtttaaagagtttctttatgtattggtgtctttcctttttaaaattttatcactcctctattaagttgtgatatccaaatttaaaatattctaaaaacatgttctcctgcaagttgaggtaatgatagttgttatgtggtacttactataatatatgccaggaactgttctaagcattttacatatttaattctcacaacaaccctatgaggtagggactaatattgtcctcattttacagaaggggaaatgaagagtcagggagtaacttgcacagatatccagctacaacatggcagaaccaggacttaaatccaaatatgctgatttcaggtttctgccctttagtcctatatcatactgtgcctccaagagagcatggtaaactaattagcatggttctatcatgattctgtttctattttgaactattaataaaaatttttgcaattctcagttaccccatttagtatagaacacaataagaatggaaccattctattctaacattgtacattgagatatcgttcccaccaccatatctgtcctccatagactatatggtgtgtcattttaaggacagaggatctaaaaatgatttttaaaggtgatttacatttactcttccctttgcaaaatggtttgcatccctaataatttagacaagtacatttcttcgtgatataaattacatttcttgcctttccctggaattctgagtactttccctctgagagaacaatgtaattcttatttatttagtcactaaaataacttcaggagtatgaataagtctactaaaaagtctacaggatccatgttgtagtttgagtagatggttccataccaagtcaaggtaaaagataatttatatataatatgaaaatggctgctttaggtttatagagtaatcaatataaatcttccttataaaagggaaatttcccacttataatttatgtaatgtaaagtttttcatttcatcttcccaaatgtttttagtcccacgcagtatttatgttagtacctatgtaaaggtgaaaagtgaattttttctactggtagaactaatactatttttagcatgtaatctgctgtcatcttcctatctttataagtggctttgaacaagtgtaaatagtgtaattctcttcattatatatactaccatgatttagattaatcttaaaccacagtttgtaatccgttactccaagcttagatttttttttcagtttatagtaagagtaatttgccttatataaccaatgaaattgttgcatttagagtgaaagtgagataaaaaaataatttatagaagaatttacaaaagttatttactcagattgttttaacataccgttataatactttgtataaggaataactctaatgaagtttctggcctatttgtaggcaaaattaattgggaataggttcctctggatcttttgctttcagaaaaaaaaaagttttttctccttttccatgtcactttatcataattgctaaataaaatatttctcccatcttaatagttttagaaagtaaaaatacttcttgaataaactgtgtagcgcagaccttcccattacagttcatttctatgtatttgtttaaatacccacagctcgaaaaacaaagaaaaaaataaaaggaattcagcaggccactacaggagtctcacaagaaacctctgaaaatcctggtaacaaaacaatagttcctgcaacgttaccacaactcacccctaccctggtgtcactgttggaggttattgaacctgaagtgttatatgcaggatatgatagctctgttccagactcaacttggaggatcatgactacgctcaacatgttaggagggcggcaagtgattgcagcagtgaaatgggcaaaggcaataccaggtaagatgcaaaacataaaagagcaactatataaacctttgtgttttcttcagcaaaaacactttggcttttatatcatcgtgagcccatggcttatcttgtttctcttagttctggggactatgaaggggagagtcaggtgaatacaggtgatagggagtttataataaaacatttacattactccctgcttttcaaatcattatgcacaggatggtaatttcacataggatgatgtaatatcagaattcaagttacaagactcactcaaaactccttttacactgaagtttggggaaagaaaatgtttttagttaattccatttgttttccttcattgtgccacttttaaaaatcaggttgtttgtaagattggtaaacatcaagtatgttgattgtcaaaatttgtactaaagtagaatgattttaacccttcactaaatgaaatgctacacattgaatgtaattttaaagataattttaaataaaagttaccctattggaatttggtgtggaatggcagaggtcaatgttagtgtcagctctgactttaaagacagggaattgacaagcctgtgttcacgcaaatagttagggagagagcaagaaagtaacctgacctcctgtcatccttgttttattaagggggaaagaggtgtgaatagcagggcaaatgttttgcttaactcattgattaatacctcaagccaagattcttttctgttttttaaaatcaatacataatagttgtacatatttactgtacatatttatatttagggggtacatgtaataatttaataaaagcatacaacgtgtaaggatcaaatcagagtaactgggatatccatcacctcaaacatttgtttggggaacattccaaatcttctcttttagctattttgaaatataaagtaaattattgttaactatagtcatcctgttgtgctactgaacactaaaacttatttcttctaactgtatttttgcacccgtcaaccattcccgcttcatccccatcaccactatctttcccggtcactggtaaccgccaagccaagaattttggctattttactatttagttcatgtttacttaagcagacagaggtgacaaaactggctttttttttttttttttacattaaaagctattaaaaagcacctagggggctgggtgcgatggctcacgcctgtaatcccagcactttgggaagcccaggtgggtggatcagttgaggtcaggagttcgagaccagcctggccagcatagcaaaaccccatctctactaaaattacaaaaattagccgggcatggtggtatgaatctgtattcctagctacttgggaggctggcactgagaatcacttgaacccgggaggcggaggttgcagtgagccgagatggcaccattgcactccagcctgggtgacagagcaagactttgtctcaattaaaaaaaaaaaaaaaaaaaaaaacacaagagggtttgtgagtcttaaagtgtcagatgacagaagaaaactgtgtctacctagtatttaatttccattttctgttaggggtgcccttgttttgacagggctaattgatctcattgctccttggcaattcccacagagatgatcttctgaagagtgttgcctcatacctttatttctcttaattcaggtttcaggaacttacacctggatgaccaaatgaccctactgcagtactcctggatgtttcttatggcatttgctctggggtggagatcatatagacaatcaagtgcaaacctgctgtgttttgctcctgatctgattattaatgagtaagttgtatgtgtgtcattttccctgtattcatagggtatctttaaccagctgatgttttcctgattgactgctattgtgataattcaggactgaaacaatcctactaggtatctaggatctaggcaaactggaaatagagttatgagtgcttggggcaggacaagtgtaatgtaaagcaaatgtacatgtggcattattactgtcccaggacatgtttgaggatatttaacagcatatctgaggttagtaaagtctgtcgcaagcaacaaggaatcttactgtgatatcatttacataaccctattccagaaagaaaaaggagcatggtaaaactcatgtggattcagtggggacaattgtagatgaggatatctaggctgatggggtgggacatatggacccagacacaagaggtatctctttgcatggcaaggctcacccagtgtctgtggtttaagaatatgggaacaaatttgttttgtttaactgagagaagaccaagcctttaagattttataaatcagctattctcttatcctctaagcttattcctgtgtctgcgaaatacttcaggtgtccatttccccttacctcattgcagttgtttcctcactcgttttctccctccagtgtaacgttcatcatgttggctaatgtttgcttcctcaagcacagtctgactgcatcacatatctccccagtacacagattgtcttcagtatcttcccactgaccctccagtacatattctgcatgatttcagactttccagaatctgacctcacttcctctcccattgttttccttcacacactcttcattcccatccatcctttccagcatactcttagactcttggtgttcacatcaccagatacacagcagagaagtcacatcctagttactctcactttctaccttgtattactacttttcgtacccctagcttattgctattagtacaatgtaaacagggagttcacacacacatacccctggtctaagaagaataaaaaatgaaggagatttctgtttgtatagaaaacagaagtcaccttgacttttattgccaaaaagaggactgttcaaactactgcatcacaatgtaacaagattaggtagttggatccaattttaaattaactggtaaatatatttagtttctggggaaactgaagacattattactcatcataatcctaccatgctgtttaaaaaataccatgttggcagtatttgttttttagtcactttctaatatgtaatttgaaggcatttaagtggaattaaaagcataaacagatttgtatgaaacaccaacttatcctggtttataaaactaacctaatttagggtttttattattagggcattcagatttagctttaagcagtcacagcaaaatctaatcatgccacatacattccttacataaagtgggatttataattttttttcctcaacagatttacattagtttcattttcattaagggatatgtacttcctattcttgtgttctcatgctgctgcctaaaagatgggcagtcctccacctttttcttttctttttttttttttttttttttgagacgagtcttactctgtcacccaggctcaagtgcagtggtgtgatcttggctcatggcaacctctgcctccagggttcaagtgattctctgcctcagcctcccgaatagctgggattacaggcgcactccaccacacttggctaattttttgtatttttagtagagacggggttttgccatattggccaggctggtcttgaactcctgacctcaagtgatccacccactttggcctcccaaagtgctgggattacaggtgtgagccaccgcacccagccctccacccttttttcttagcccactatgtttccatactgctctggtgtctgtgacaggcagatattgcatatcagaaagtatgcattcaagttctgaccctctatagagctgtcaaacagtctctcatggttgcccttaggtcagaacgttgtgggggaaaaaaaaattgttgttgtttttacagccaacaagaatgagtttttacttattctactacactataactttgttgaaattttcagttatatgagtataaccatgtacaagaaactaaaggaaaaaaaggtgcctcccagaaaaggagtgctttacctactattaaggactagggaggtgcctcttcggtaagagcagattttaaatttgaagagcctctgatcactttggcagcatataagtcatgtctaatttattttatataaaggaataaaccacatattcagtagagaaaaataataacctttctgttgttaagtccaagacgactttctgtcagaaacttaaaaaaaaaaaaaaatcttgaagcattttaaaagctgtgaactgggcccagtttcaggctcttagtgtcatttcacaagtcaggaaactttagagacctatttgaaaatcataggtatgtaatgacttcagaatcataagcaagaattggtttagtacctttagtttaaagaatattaaggcatatgcctgtcagaggcagattttgagcatcagaagtctagaatcaagttctaggtctcgccctctgcataactgtgaacagtgtcacacatttttgtctttaggatggactgctgtgaaaaaatttacctttaaaaatcaagtgtgtaggacctaaaactgtcgtctaattgaccgtattcaaatgataaaccttgatttaaatgagcaactagtaataagttctataagaattctaacactttaattaaataataaaataatacatggcatgcatgatagaaaataatatctccactgttacattagattattcattagtctatttaaacagccaagatgcaggaagtttaaggaaagttctccaaaattctgattttatagggaattagcaataatattattgcagtagttgtttttctttatgagttcatagttttgcaaaacaaaacaaaaatgtgctttttggggggaagtagcagtatttctaactaataccctgctatttatctttcacaggcagagaatgactctaccctgcatgtacgaccaatgtaaacacatgctgtatgtttcctctgagttacacaggcttcaggtatcttatgaagagtatctctgtatgaaaaccttactgcttctctcttcaggttggtagaacaccttttcaccttatgtcaaaagcatgaaatatgaaggcctagaaacaaaggttaatttatatacatagtactaataattataccaagtctactattatttcctactagtcagatgatttttatgaatgtaaaatattagaaaggcacagtaagtgacaccaagattaataagacaaataggtatggcagaaacagagaggtatatgagctgcatagggatctctgttgataagaatctgtgtagacttttttctccttccttcctttgatctttgatcatgggaagacatggaaaaagaaagctaactacagtgattttgtccactacactgttatttggttaaaaattttagtttcctaatgagtattagcatgtatgagaaattatgggagaaaaaggcgcatcctagaaaaggtgtgcttaattactattggggattggttaacatagcatgggagctggattgtcagagattcattatctagaaaatggcaacaagagtttataaaacgaacttctgtgagattactttttagctagcaaagacaaagatgtccttcagtaggtgaagtgataaactatgatacatccagatgatggaatactattgaggactaaaaagaaataagctgtcaagccatgaaaacacatggagggacgttaaatgcatattactaagtgaaaaaagctaatctgaaagggctacatactgtgtgattctaactatataacattccataaaaggcaaaactgtgaagacagcaaaaaaaaatcagcggttgccagggtttagaaggaagggagggataaatgtgcagagcacagaggatttttagggcagtgaaaatacttcgtatgatactacaatggtggaaacatgtcattatacatttatccaaacccaaagaatgtccaccaccaagagtgaaccctcaactatggactttgggtgatgatgtgtgggacaggaggtatatgaaaaatctctgtaccttcctcccaattttgctgtgaacttaaaactgctctaaaaaaagtcttttttaaaaaaagctctatgaactagttggtattataaaccttaggccatttcaagtaaaaattacatatcaatgtttattaaatactgagttaatagctgaatacctctttcatatacaaataagtacatttgcaattttttaaaaagtcttaattccattagtaactgtggtttcatagttgccaaataactgtaagctatggatgttgcacaagactgtgattttatttaatcatttcatatctatttaaacatttccaaagcgcacattcatcttaatgttttcacactatttttgctcaacaaaaagttattttatgttaatggatataagaagtattaataatatttcagtcaaggcaagagaacccgataaagatcattgctagagacgtttaatgttacctgtagcggtacacttgttaaagaagtgattaagcagttacataaaattctgatcatagctttgattgataccatgaaggtataattcagtgcctggatactaacaactttacttgtttaaaaaaaaaaaaaaaagaatggtttcaattgtatacatcccagactaattgagctatatgatttttttcattgtaaataatatcacgagttcttcttgttaaaaaataatagaatcataaggatggaaatatataccttaagatatagacttctactatgatagactactggaataggtatataacctcccaccaaaaatgctagactaaaaaaattaagaactaagtgaaggcaggaacctacagagataagtggaactcaagccaacttgctctttgacggcatttgtagaacctggtaaattagtaagtttagtaagttggggtttttttaagtttataatcttttttaaaatgatttcaataggtttttggggaacaggtagtggtaggttacatgaataagttctttagtggtgatttctgggattttggtgcacccatcacccgagcagtgtacactgtacccaatgtgtagtctttcatccctcatcccctccccaaccctagtccacaaagtccataatatcattctcatgcctttgcatcttcatagtttagctcccacttagaagtgagaacatgcaatatttggtttcccattcctgggttacttcacttacaataatggtttccagttccatccaggttgctgcaaatgccattattttgttcctttttgtggctgagtagtattccatggtatatatataccacattttctttatccactcgttgattgatgggcatttggactggttctgtatatttagtaagtttaaaaacaagggatggaaatataaatgcagttgaaaaggcagtggatggatctaaaagcagaagaatacaattgtttttaatgattgtgtatatgtttgtgtatataaaccacaagggaaatctgtaggtactgaaaatcacaacaggaaaatggcaacaaagctatagaaactggaaaagcaatgacttttcttagatccctcagagaatggaggtcataggacaaaccaccacttcaaaatctagaagaatagacaaatacagagaaacagccaagatcagcttactgggaaaagatgccactgaagccaggaagactatggcaatttgggaaaagatgccactgaagccaggaagactatggcaattttgatgaattgctggaggctgagtgaggactagcttcagagttaaaaactcccagggacccagtcttagtgggggtttcctgcaatttcttgggtttaccccacaaaatttctaacttccagaaactccacaaggttcttatggtgaagatgcaagaaaaattccctcctttttctggtaggagtagagggaaggtaaaatttggaaatacgtagcagagtgttcacaacaaaaggcctgccctgtaaggaaaactaattcaacaggcccttatgtgacctgggggaaaggcaaatagaggattctagcccttccttagccttcttgtctcatttctgaaagtcacagcccagggattcagacccactaaaaaaaactgagatttaatcataaagattaaaaaacaattcccctccccctccccaacaccttaccaccatataaacagggctccaggataaaataacagtggattacaactgagagagctgcaagacacaagctgtttaaggagctcttaggaaacccaaaaacaacagaagaaaaagtaaataaaaacaaggaaactagaggaaactgaagcctccagtacctacaattatggcaaacattaaatacagcccagctcctagccagattagcatgaaacctcacactaaaagtctaattacttcagttttgatatatcaatcatgtccagctttcagcaaaaaaactacaaggcatgctaaaaggcaagaaaaacccacggtctgaagagacaaaacaagcatcagaagcagtcctcagatatgacacaaatatttcaattatcagatagggaatttacaatacctatgattagtaggttaaaggctccaatggaaaaaagtagacaacatgcaagaagtgatgtacgcagagagatggaaactctaaaaataaatgctaaggaatgctgtaaggaaatgcagaatgatgttgatgggctcatcagtagactgagcacagccaagcaaagagtcagtgagcttgaagatagataggtcaaaggaaattcccccaaactcaaatgcaatataaacatagtagacattaatccagctgtatcagtaattactttaaatttgaatgctctaagtacaccaatcagctatttttttaactaggaggtgaaaataaagtttgccaccagatgctcactaaaaaattattagaggatatatcccagccaggcgtggtggctcacaccggtaatcccaacactttgggaggctgaggcaggcagatcacagagtcaagagatcaagaccatcctggcttacgtggtaaaaccccatctctactagaaatacaaaacttagctgggggtggtggtgcgcgcctgtagtcccagctactcaggaggctgaggcaggagaatcacttgaacctgggacgtagaggttgcagagagccaagatagcaccactgcactccagcctagtgacagagggagactccatcttagaaaaaaaataataaaagtaatcccatctttaagaaggactgaagaataacaaaagtggtaaataatatagatacatttaaactgacatttactatgtatataaaataacaacagtaacaatttccttgagggctaaaaagtagaactaaagtaagtttcaaggatgacaactagaaatagggtatgcagggtatgcaaagtaccaaaccattgggggaagagaatacctaagaaaaacaatccaaaagaatgaaagacatgagaggagggagaaaaaaatgcataaacaagggcatgataacaggaagtaacagataaggtacattagtacagctaaattcaaacacatcagtagtttagtttcattaaatatagagatggggccaggtgtagtggctcacacctataatcccagcactttgggaggctgtgggcagatcacttgaggtcaggagttcgagaccagcctgaccaacatggcgaaaccccgactctactaaaactataaaaagccgggtgtggtggtgcatgcctgttatcctagctactcgggaggctgaggcacaagaatcatttgaacctgggagatggaggttgcagtgagccaagatcgtgccactcttctccaaactgggtgacagagggacactgtctcaaaaataaaataaatgtagagatggactgaatgctccaagctaatctgacaggattttagaaataatccaaatttatgctatttaaaaaaagctatatctgaataaagatattgaaaggctgaagtaaaaggatctactttgcatagtataacccaagacatggccaactttttctgtaaagggccagatggtaaatgttgttagctttgcacagtctctgtcacagctactaaactctgcccttgtggcaggaacatagtcattgacggtactcaaatagaacaggcatggctgtgttccaataaaactttatttacaaatacaggctgcaagtaggatttggcccataggccaaagtttgctggcccctatattgaccaaaacaaaaccgaaggagctacattattaccaagcaaaatagatgttaaggcaaaatactccttaaagcatttgttcaggaaaaataattgtaaatatatagtttcaaattacataatacaaaaattcatagaacaagaatacttagataaatctagtaaaaataatgagattttactatacctttcttacaaattaagcagacaaaaaaataaggatatggatgtacatttcatctctcttgggtcaatactgaggtgtgagatcactgggacataggttgagtgtgtgtttaaatttatttttaaaattgccaaacttttccgcaattgttaacatttaccagaaatgtatgagacttcttaagatccattctatatcctcctcagtacttggtactgtcagcctctttcatcgtaggtatactgatgattaaaaatattaagcatcttttcatgggcttattggccacctatatttcttatttggtattgtgcctcttttaatcttttgcccattttttaactgggttttaagaattgttcaaatattctcaatgtggccctttgttaaatatatgttttgcatgttttctttaagtggattacatttacagttttcttaaaaaaatgtagagatgagcaaaagtgtataattttgaagaaagcttcgtgtctttgtttactaagaaagttttgcttaatccagggttaaaaagattttctactatttgttttcttatagaaattctgtagtttcagctcacatgcttaagtatatgatgcaaggtaagggacaaggttcattttcttccccaaaatccatatctggttgctccagaacttgactctcttttccctattgagttacttggcaattttgtagaaaatcagttgtttgtatatgtgtgggtctactttcagactctttttcttacccaacgatctgtatttcttacccaatgatctgtatgcctatattcatattgataacaccctgtcttgattactgttgcattacagtaaatcttgaaatttggtaatatgaattctccaaatctgttgttcttttccaaactgttgttttggatattctagtttccttgcatttccacttccttttttttttttttttttgagatggagtctcactattgttgcccaggctggagtgcagtggcatgatcttggctcatcgcagcctcagcctccccagcagtgggattgcaggcacccaccatcatgcttggctaatttttgtatttttagtagagacggggtttcgccatgttggccaggctggtctcaaaccctgacctcaggtgatccacccacctcggcctcccaaagtgctgggattacaggcatgagccactgtgcctggtcttccacgtattttttaattagcttgacaatctctaccaaaaagtcttttggggctgggtgtggtagttcatgcctgtaattccaccactttgagaggccaaggcaggcagatcgcttaagcccaggagtttgagaccagcctgggcaaaatgtcgaaaccctgtcactacacaaaatagaaaaaattagccaggcatggtagcttgtgcctgtagtcccagctacccaggaggctgaggagggaggtcaaggctgcagtgagccatgatcatgccagtgcactctagcctgggcaacagagtgagactctgtctcaaaaacacagtctgatagaatttttattaggatagccttgaatctatagatccatttgaaaataattaacatcttaaatttccaatttctggccgggcgctatggctcacgcctgtaattccagcacgttgggaggccgaggtgggcagatcatcaagtcaggagttcgagaccagcctgaccaacatggtgaaaccctgtctctactaaaaatacaaaaaaattagccaggcgtggtggcacatgcctgtagtcccagctactcaggaggctgaggcaggagaatcgcttgaatctgggaggcagaggttgcagtaagccgagattgtgccactgtactccagcctgggcaacagagtgaggctccgtctccaaaaaaaaaaaaaaaaattccagttgttgagaaagaataggaattccagctttggaggagtggggagaccatcaaatcctctttccaaaaatactactaaaatactactgagcagagtatagttccacaaatagtcttctgtaaagagactcacagtacatatttgtctttgtaggccatatagtccctgttgcaatttctcaattctacagctataacaggaaagcagctatatacagtatgtgaatgcttgtgttctaatacaaatttatttgcaaaatcaggaaaatggcttgaaatggtttaagatctagttttctgactagatcatggtatataatcttttccatatatattttgaatttggtttgctaatattttgctgatcatttttatatctctctttatgaaggatgctgatctacaactttcttttcttgtgatatctttttctggctttgctaccagggtagtactagcctcttaaaatgagttgagaagtattttctgttttcttaaagagtttatagagtattgatcttatttattctttaaatatttgatacatgttaccagtgaagccatctgggtctgtgttttctttcagggaagatttttaattatttgcttatttgttatatagatctattcagaatttatatttttccttgacatagttttgtaatttgtgtgtttctatgaaatgagccattttgtctgagttgtctaacttgggcataaagttgtttgtaatcctttaagttttgtaggatccatagaggtgtcccctccattatagattttcataatttgtgcctgatcatctttttttcatggtcagtctagttaaaaatttatcaattttgttggtctttacaaagaaccaatttttagtttcattgaaatttttagtttcattgattttctctttttgtttcctatgtcattgattattatttcttcttttctgcttgcttttcatttaatttgttcctctttttctagtttaaggtagaagcttccattgttagttgaagaccttattttcttatatagatgtttaaagctatacattttttgtatattttcattcatttcattttctaatgtccttcatgatttttttcattgacccatgtgtattgcttaatttttatatatttggggattttccatatctcttcctattcatttctaatttaattccactgaggtaggaggtacattgaaggactctaatattgaatgactccaataagtcttctgagacttttttaggcacttgcatatggtctatcctgagtgttccatgagtgcttgaaaaaaaacttactgtgctcttgttaagtagagttttatgaacgtcagttaggtcaagttgattgatagactaattcaagttttctgtatctttgctgattttctgtctagttgttctagatcctacaactttgtctacatccttgccagagcttggtatggtttttttattatcgctatcctagagagtatgtagttgacccttgtgacttgccatgcatttaatgactgcccatgttcatagcagcattattcataatagcaaaaaaaacttttatcatatgcttttgtgcctcaagatcatatatttttcgtttttagtcactaatatggtataatggtataatatactgtttaatttctgagtaattgactagcctttcattccggggataaatcctatttggttatgatatagtatcctttttacatatagctgaattcattgtactaaaattttggtatttttgcatctaaatccatgagggatatattctatagctttggtgttatgataatatggtattatttctttcttaaacgtttggtaaaactcagcagtgaagctgtcttggtttgtttggagccttttttgtagaaaggttttcaagtacaagttcatcaaatgtttactgataatatgtttattcttgagtgagctttgttggtttacatctttgaaggaatttaactgtttccttcaaatgttgaatttattggtataaagttaagttattcataatattcccataatatccttctaatggctccagtatctctagtgttattccctttcattcccgacattggtatttaatatattcttgctttttttttttttttttaatcagtctggctaaaagtttttcagttttaccaatgttttcatagaaccagcttggtcttgattttgttgttgtttatgcatgttcttagttattcgtttctactctttatcctttccatttttcttgtgtttagggtagaagcatatataattaattgagacctttcttttctaatcaaagcttttaatgctgtaaattttctaagcactgtcttcattgcatcccacacattttgatatgctgtgttttcagtactagagatttttaattttatgataccttatttaatcatgatgccttatttaatctatagcttattaaatgtcaaattctaaacatttgggtttttctccagatatgtttgttactgacttctattttaatctcatttttgtcagacagcattcattgtatgacttaatcctcctaaatgtattcagacttgttttatgttctagattaatgttctgtgtatacttgaaaagaatgcaagttcttgggtagactgtttcagaaatgtcagtcaaatttaagtcttgtttattcttattgattctgagacaaaggtgtttataatgttagatttgtctgctatatctctgacattgccaaatatccccttggaggcaaaatctccccctcccttttgagaaccactgatctatgtagccttttttctgggactaatttagccttgcttctgagatgtggcccctaggtctctactgaatgcccggcatatttaattagatctttctttcctctatggcctcaagggatttcaccctaagtatgcacaaatttttattcagccgaagactgtacagatttctggaggcctttctttgtgtacctccttcgtttccagtagtctgacccataaattgtacagatttctggaggcctttctttgtgtacctccttcgtttccagtagtctgacccataaattgtacagatttctggaggcctttctttgtgtacctccttcgtttccagtagtctgacccataaattaaagctgctttagcctccccaaacttcaatctctttctcctcaacccagcaagattgctagaccctgggttccctttcccttcactgcagtatgataattactttcaagcacaaaggtttagaattaagatttcttactcctgggctaggtatggcttaccgtatttgtttctcttttcctagggatcataatcatgtattgcttgttgtccagttttccagtaggaggggaattccaggctgtacttacttcctgcagccaaaagaggaagtaatgttagtgatttcaatattaaaacattaaaaaaaaatttaagatggatgaaattcttttatatgcatattgaattgggcttcaccatagttatttttagaattaggactaaccggcagggaaaaaaactatacggcagggaaaaaaactataagccatcgctgttttacaattttgcaataattagattttctgtagtatagtaatgtgtaaaattaacccattgttaatatagaatgccgttatcactcctgattaagcggtcttcattttcatgttaatactgatgtcttgtaatgctttatggaatcaaacattttcatacatattcattagtctaattctaatcataatccaatgaaaaagagcaggaaagatgctcaaggaggttatattcaagtccacatggcaagtaagaaataagactactcggctgggcatggtgacttactgcctgaaatcccagcactttgggaggccaaggtgagcggaattgcttgaacctgggaggcggaagtggcagtgagctgagatcatgccaatgcactccagcctaggcaacacagcaagactctgtctcgggaaaaaaataataataataagacttctagaagctcctaaatccatagcttttcctctataccagcatcttctaaaaatgtcagcagcagtgaagtttcagtttgggaaataatgcatttcccctctctggagagtgcacagttatatctccaagaagtactgaaattcagaagtctgcctaatatgtattaaacatttagcttttctcaaactttgaccaccaaatcctttgtctcgctctaactatagttaacacagaatcagtgttcccaggagcacactgtgaaaaatgtagcactctacaaaagtcctaatctccacaggattaagtgaaaccatgattaaccctctgttccttgtccttattagtaccattttctgaagagtaatgtatccccccaaaacttttatactagtttcactaaccagaatccatgtacataaggaaggacagatatttgctccctactaagacatatctattagctacattaaaaaaagtattgcatgccgattttaaagttataattaactggtgatatcacagatattccaagatataattgctggaataaacactgttgttgaagccttctatctatctcagtactagaattaaactcaagtgcagaatggcagacaaagttaactaaaaatcactgtattatttcatttggtcctccaaatagctttgtgagctaaggaggagaaggtgtatcatcaccacttccattttatagatgagaaatcaagtgatttactcaaggttaagtcctccaattctttgttatcctgcattttctcttggctgtagtttaattaataatcctaagaaaatgcttatattttagagtgcagtaagagtacataaacaatgttaaatgcccatcttgcatgtataaaaagttatagcaagaaatctggctgggaatggtggctcacacctgtaatcctggcactttgggaggccgaggcaggaggattgcttgagcccaggagtttaagaccagcctgggcaacatagggagatcctgtctctacaaaaaaatttagccagacacagtggcttgtgtcctagctactcaggaggctgaggtgggaggatcacttgagccaaggaggtcaaggctccagtgagctatgattatgccactcagacatggtggcttgtgcctacagtcctagctactcaggaggctgaggtgggaggatcacttgagccaaggaggtcaaggctccagtgagctatgattatgccactgcactccagcctggatgacacagtgagaccctatctatctcaaaaaaaaaaaaaaaagaaaagaaaagaaaaagaaaatcctttaactgacttcatcttaaccttttagttcctaaggacggtctgaagagccaagagctatttgatgaaattagaatgacctacatcaaagagctaggaaaagccattgtcaagagggaaggaaactccagccagaactggcagcggttttatcaactgacaaaactcttggattctatgcatgaagtaagtgtcaaacataaagccaaatataagagttttctgggacaaagtatgttttgattagtgaatataattatataccagcagcgcccccacccccgcccccagtttgtggatgttggtgatagcttgagttcaacttatgaacttcagttttgtagacatttttcctaaggccaattatgaaatatcctttcacctagtcatgtgtatataaaatcaccatgttattacagaatttagtaatactgtttttaaaaagtatgattaatccattaaattagaataatgcacccttcatatattatggtactacagtgattcatgaaataattctatataattctacatacaatcaaagaaatataaaatgtgttttgtacggaagtgcttatttttcatctggggaattccagtgagattggtatattctaggccagataattttttcaaaatagaggacaacaaacatgagatgttcccactgaccaatttggaagcctgatcattaccatatcttctcttgcaggtggttgaaaatctccttaactattgcttccaaacatttttggataagaccatgagtattgaattccccgagatgttagctgaaatcatcaccaatcagataccaaaatattcaaatggaaatatcaaaaaacttctgtttcatcaaaagtgactgccttaataagaatggttgccttaaagaaagtcgaattaatagcttttattgtataaactatcagtttgtcctgtagaggttttgttgttttattttttattgttttcatctgttgttttgttttaaatacgcactacatgtggtttatagagggccaagacttggcaacagaagcagttgagtcgtcatcacttttcagtgatgggagagtagatggtgaaatttattagttaatatatcccagaaattagaaaccttaatatgtggacgtaatctccacagtcaaagaaggatggcacctaaaccaccagtgcccaaagtctgtgtgatgaactttctcttcatactttttttcacagttggctggatgaaattttctagactttctgttggtgtatcccccccctgtatagttaggatagcatttttgatttatgcatggaaacctgaaaaaaagtttacaagtgtatatcagaaaagggaagttgtgccttttatagctattactgtctggttttaacaatttcctttatatttagtgaactacgcttgctcattttttcttacataattttttattcaagttattgtacagctgtttaagatgggcagctagttcgtagctttcccaaataaactctaaacattaatcaatcatctgtgtgaaaatgggttggtgcttctaacctgatggcacttagctatcagaagaccacaaaaattgactcaaatctccagtattcttgtcaaaaaaaaaaaaaaaaaagctcatattttgtatatatctgcttcagtggagaattatataggttgtgcaaattaacagtcctaactggtatagagcacctagtccagtgacctgctgggtaaactgtggatgatggttgcaaaagactaatttaaaaaataactaccaagaggccctgtctgtacctaacgccctatttttgcaatggctatatggcaagaaagctggtaaactatttgtctttcaggaccttttgaagtagtttgtataacttcttaaaagttgtgattccagataaccagctgtaacacagctgagagacttttaatcagacaaagtaattcctctcactaaactttacccaaaaactaaatctctaatatggcaaaaatggctagacacccattttcacattcccatctgtcaccaattggttaatctttcctgatggtacaggaaagctcagctactgatttttgtgatttagaactgtatgtcagacatccatgtttgtaaaactacacatccctaatgtgtgccatagagtttaacacaagtcctgtgaatttcttcactgttgaaaattattttaaacaaaatagaagctgtagtagccctttctgtgtgcaccttaccaactttctgtaaactcaaaacttaacatatttactaagccacaagaaatttgatttctattcaaggtggccaaattatttgtgtaatagaaaactgaaaatctaatattaaaaatatggaacttctaatatatttttatatttagttatagtttcagatatatatcatattggtattcactaatctgggaagggaagggctactgcagctttacatgcaatttattaaaatgattgtaaaatagcttgtatagtgtaaaataagaatgatttttagatgagattgttttatcatgacatgttatatattttttgtaggggtcaaagaaatgctgatggataacctatatgatttatagtttgtacatgcattcatacaggcagcgatggtctcagaaaccaaacagtttgctctaggggaagagggagatggagactggtcctgtgtgcagtgaaggttgctgaggctctgacccagtgagattacagaggaagttatcctctgcctcccattctgaccacccttctcattccaacagtgagtctgtcagcgcaggtttagtttactcaatctccccttgcactaaagtatgtaaagtatgtaaacaggagacaggaaggtggtgcttacatccttaaaggcaccatctaatagcgggttactttcacatacagccctcccccagcagttgaatgacaacagaagcttcagaagtttggcaatagtttgcatagaggtaccagcaatatgtaaatagtgcagaatctcataggttgccaataatacactaattcctttctatcctacaacaagagtttatttccaaataaaatgaggacatgtttttgttttctttgaatgctttttgaatgttatttgttattttcagtattttggagaaattatttaataaaaaaacaatcatttgctttttgaatgctctctaaaagggaatgtaatattttaagatggtgtgtaacccggctggataaatttttggtgcctaagaaaactgcttgaatattcttatcaatgacagtgttaagtttcaaaaagagcttctaaaacgtagattatcattcctttatagaatgttatgtggttaaaaccagaaagcacatctcacacattaatctgattttcatcccaacaatcttggcgctcaaaaaatagaactcaatgagaaaaagaagattatgtgcacttcgttgtcaataataagtcaactgatgctcatcgacaactataggaggcttttcattaaatgggaaaagaagctgtgcccttttaggatacgtgggggaaaagaaagtcatcttaattatgtttaattgtggatttaagtgctatatggtggtgctgtttgaaagcagatttatttcctatgtatgtgttatctggccatcccaacccaaactgttgaagtttgtagtaacttcagtgagagttggttactcacaacaaatcctgaaaagtatttttagtgtttgtaggtattctgtgggatactatacaagcagaactgaggcacttaggacataacacttttggggtatatatatccaaatgcctaaaactatgggaggaaaccttggccaccccaaaaggaaaactaacatgatttgtgtctatgaagtgctggataattagcatgggatgagctctgggcatgccatgaaggaaagccacgctcccttcagaattcagaggcagggagcaattccagtttcacctaagtctcataattttagttcccttttaaaaaccctgaaaactacatcaccatggaatgaaaaatattgttatacaatacattgatctgtcaaacttccagaaccatggtagccttcagtgagatttccatcttggctggtcactccctgactgtagctgtaggtgaatgtgtttttgtgtgtgtgtgtctggttttagtgtcagaagggaaataaaagtgtaaggaggacactttaaaccctttgggtggagtttcgtaatttcccagactattttcaagcaacctggtccacccaggattagtgaccaggttttcaggaaaggatttgcttctctctagaaaatgtctgaaaggattttattttctgatgaaaggctgtatgaaaataccctcctcaaataacttgcttaactacatatagattcaagtgtgtcaatattctattttgtatattaaatgctatataatggggacaaatctatattatactgtgtatggcattattaagaagctttttcattattttttatcacagtaattttaaaatgtgtaaaaattaaaaccagtgactcctgtttaaaaataaaagttgtagttttttattcatgctgaataataatctgtagttaaaaaaaaagtgtctttttacctacgcagtgaaatgtcagactgtaaaaccttgtgtggaaatgtttaacttttattttttcatttaaatttgctgttctggtattaccaaaccacacatttgtaccgaattggcagtaaatgttagccatttacagcaatgccaaatatggagaaacatcataataaaaaaatctgctttttcattatgtgactccaacatgcttttgtagaacttgtacagttccgattgtccaatctgatttttgtttactgaaagtagagttacccctgcttcaggaaccttaagataatatggtgggcatttaaatgtcagtgtggcaatgttcgcctgctaatatggcatagattcaaaataagcttaaccctggtgccaaagacctgaagattatcccatccatgcctcaaatggttgtgtgccaattactgcaaagggtactaagggaaggagaaattcactcctgaggctgcttcaaatgtatgtctttatcacaaaagatgacattttatgtaagctaatgttatctagtcaaaattcttagcttattttaaaatcaactcttcaagaaaaggaataaacatttaatataaatatcatagcagtattgcacatagaatagaaaggtcgggcagggtagtggaagtcagctattctatacaatccattcggtattttccaaaacatttgatgttcaggccatatccaggaactggatgacctaacaaacttctctgagtacctttttttccacaagagatctccatcactaagaaaaaaagcattgtgatttaaaagccaaatttgccttatccatcatcatgtgcaccaagtatttgctacctgcctactatataatattgaagatacaatgtgaataagaaaaatactattgctaccctcaatcagagtatgtgattggaaaagtgtataacaaacctttcccagtgtcttcaggtataatgcagagataccagatacggcatcaatgtgtatacacattatggctgtaccattcactttaagtagtaaccttacatttctgtagaacaccttcacatacatttttaacaagcctcactgaatgaattaatgacatgaaaataatgaggcagattattctcgtttccattttataaggaagtaaactctgtaagaaagtaaacaggctcagaatttaagcactgattcatagcccctagctcccatgttattgaaatttgaatggaaagcctctaatgaggccattcatctatcagatgtcaaagagcatgtctctggcctatgagcctctcagggaactggttatgtttttctgttttaaattaaactaatgctttactgagcacttactatgtgccacgcacaatgataattcaatatattatttcatttaatcatagtacccctctaaagtactactgtaaagcagtgctattatcctcattgcatttatatcaggaaactgtggcttaaagaattgagtaacttgcctacagtcacaaagctagctccagaatccatagttttaaaaaccactattgagaaattactaatatgagctaactagggcgaatgaacccatattgatcattatgtgtctggccttttgacatgtcctcatttaatctaatcccttttgctaccgtatcaattttgacttagaaatttaacaatgatacattagtccccgcttatctacggaggatatgttccaagactcccaatggatgcctgaaacatagatagtactgaactgcatgttttttcctatattacatacctatgataaagttaatttacaaattagatgcagcaagagattaacaataactcaattacaacaatatactgtaataaaagttatgtgaatgtgagctctcaaaaaatcgtactatactgagggtaactgagaccacggaaagtgaaaccgcagataaggcgggcactattgtatttccttctcttaaaaacgtgtcctgtaccctggggtggttgatggtggaaaatactagttgcccacagattacagaatgccctttggtttgtctaatatacaacagggagcctgtctcactaatgcccacagaaaaatcaaacatttcttcaagtgatatggagcatatagggtacagtcaaaccaaggaagaaagttgtttataaatgagaactatagtgcaagttaaaatttgctcctagttttgcaggtaaagagccagactttgggtgtagaaaaaaagttgaaaatactgaggcttttacataaggtgattttttttttttttttttttttttagaatttcaactaatctcttttaacttaagtcgttcttaacagtattggtaacttcatagcactttctttctggtgaaataaccccatcctccctcttatttaggcttcctgtttcctagttaaaatggggcagtactttgttagggaagtatttttacttcacttggttacaaacatgtaagtctcagaacaaaagagtttgtgcagaccatatcagacactcaaaagactttcttcactctacccacttgagtaagagacaatttatattctgttcaccttatgtaccctcaccaaaaatattcaatagggtaataatgtgtata

SEQ ID NO: 11 - DNA, 20001 bp, homo sapiens
  misc_feature (1)..(993): n is a, c, g, or t
  misc_feature (2653)..(2743): n is a, c, g, or t
  misc_feature (5539)..(5563): n is a, c, g, or t
nnnnnnnnnnnnnnnnnnnnnnnnnnnnnnnnnnnnnnnnnnnnnnnnnnnnnnnnnnnnnnnnnnnnnnnnnnnnnnnnnnnnnnnnnnnnnnnnnnnnnnnnnnnnnnnnnnnnnnnnnnnnnnnnnnnnnnnnnnnnnnnnnnnnnnnnnnnnnnnnnnnnnnnnnnnnnnnnnnnnnnnnnnnnnnnnnnnnnnnnnnnnnnnnnnnnnnnnnnnnnnnnnnnnnnnnnnnnnnnnnnnnnnnnnnnnnnnnnnnnnnnnnnnnnnnnnnnnnnnnnnnnnnnnnnnnnnnnnnnnnnnnnnnnnnnnnnnnnnnnnnnnnnnnnnnnnnnnnnnnnnnnnnnnnnnnnnnnnnnnnnnnnnnnnnnnnnnnnnnnnnnnnnnnnnnnnnnnnnnnnnnnnnnnnnnnnnnnnnnnnnnnnnnnnnnnnnnnnnnnnnnnnnnnnnnnnnnnnnnnnnnnnnnnnnnnnnnnnnnnnnnnnnnnnnnnnnnnnnnnnnnnnnnnnnnnnnnnnnnnnnnnnnnnnnnnnnnnnnnnnnnnnnnnnnnnnnnnnnnnnnnnnnnnnnnnnnnnnnnnnnnnnnnnnnnnnnnnnnnnnnnnnnnnnnnnnnnnnnnnnnnnnnnnnnnnnnnnnnnnnnnnnnnnnnnnnnnnnnnnnnnnnnnnnnnnnnnnnnnnnnnnnnnnnnnnnnnnnnnnnnnnnnnnnnnnnnnnnnnnnnnnnnnnnnnnnnnnnnnnnnnnnnnnnnnnnnnnnnnnnnnnnnnnnnnnnnnnnnnnnnnnnnnnnnnnnnnnnnnnnnnnnnnnnnnnnnnnnnnnnnnnnnnnnnnnnnnnnnnnnnnnnnnnnnnnnnnnnnnnnnnnnnnnnnnnnnnnnnnnnnnnnnnnnnnnnnnnnnnnnnnnnnnnnnnnnnnnnnnnnnnnnnnnnnnnnnnnnnnnnnnnnnnnnnnnnnnnnnnnnnnnnnnnnnnnnnnnnnnnnnnnnnnnnnnnntacttggccctcctaattgggtgttctcagtgaaaacgaggacactgctaatatgctttagaaaatagccctcacattctccctgttcccaatcccccacttactctaagctccccaggtagcaataattcagaagtcaaattgctcagcactcctatggttcaagtgattcttgtgtctcagcctcccaagtagctgggactacaggagcccaccaccacgcccagttaatttttgtattttttagtagagatggggtttcaccatgttgaccaggctggtctcgaactcctgacctcaagtgatccactggcctcggcctccaaaagtgttgggattacaggcgtgagccactgcgcccagcctcaaccttctagtgaaccctccatgctctgttatcttttattcctcttggatttttgttgtttcttttctttttcttcttctttttcttttctttttttttttttgagatggagtttcattcttgttgcccaggctggagtgcaatggcacaaccttggctcactgcaaccttcgcctcctgggttcaagcaatttgcctgcctcagcctcccaagtagctgggattacaggcatgtgctaccatgcctggcgaattttgtatttttagtagagacagggtttctccgtgttggtcgggctgatctcaaactcccgacctcaggtgatcagcccgccttggcctcccaaagtgctgagattacaggcatgagccaccacacccagcctttttgttgtttcttctgagagatttcttcaactcaattttccaacccttctattaaattttttaaattccagatattctatttgcagccggcaaggactcttcctgcgctctgcttgttttccaaagcattccgttctagtttttatgggagcatcatcctttcatgtctctaaggataatcagagtggttaaaatgttcttgaagttttcttctgttccctgcagtagctctgtttcctccagtttcctctttcccaagtgattggtctgtctcatatacctagaggtcttgctttgcattcacatctaagggcaaaaggcgctaggatgcagtgcggaggtccattcgctttgtcgtaaggtttgtgcctttcttagtcctgcagtggttgagtaaaacctgaccatcccacaccctcaaatactaagtgcccctgggtagtgatgtggaggggccttcttattaatgtgaggaaatgcttgtgttataggttgtggtgagaaacgctggttacaaaactatatcaaagtaaaaatgtattaatgcacagtaaagacacctggaaaaaaaatgccctttaatgctcacagaaggtctctccgaggggcagccccaccaccctcctgtttcccttcctgcatttccacgtttttctgggcccagatgcagcctcccctcccacccctggtccctccgccttggcttccggctgtcgctttcatccctcctcctcatcagccccttgcagaactccagggtggggcttctgagtctcgctggcagtatgggctccataagtcttgctggacaccgaaattaagttctgcaggtgccgtctccagaatccccagcacagatagacaaacccacatctcaggggtggggggtgcagacctgcccccagnnnnnnnnnnnnnnnnnnnnnnnnnnnnnnnnnnnnnnnnnnnnnnnnnnnnnnnnnnnnnnnnnnnnnnnnnnnnnnnnnnnnnnnnnnntcccagctgccctctgtttatatgtctcaccaatgtcaagggaaaccagaactggatagcagttgaaacacatattttgttcgggactattgtaataggggaaaaaagattttagtatagacctgggctcaactctcaatgtggcacaggcaagtggggatttagatctgaggagcagggcggggtcagtgggtggaaaattactggcacgaaacacctgtctggaggattctggctaaacccaggaaacaggaagcttgctgagggcaggcagggttagcagacatcgcctgggggtggcggaggctgagaaccctacccaggtaaaatgaagcttgctgacggcagacagggttagcagacacggcctggaggtggcagaggctaaggaacctacccaggtaaaacgaagcttgctgacggcagacagggttagcagacacggcctggaggtggcagaggctaaggaacctaccaaggtaaaatgaagcttgctgaaggcagccagggtgagcagatattgcctgggggtggcggaaactgaggaccctacccaggtaaaaggaagcctgctgaaggcaggcagggtgagcagacattgcctgtgggtagcagaggctgaggactctacccaggtaacaggaatcttgcttaaggcaggcaaggtgagcagacatcgcctgggggtggcggaggctgaggactctacccagataacaggaatcttgctgcgggcagccagggtgagcagacgtcgcctgggggtggtggaagctgaggaccctacccaggtaaaaggaagcttgctgaaggcaggcaaggtaagcagacatcgcctgggggtggcggaggctgaggaccctgatcagatatggggggatggaggcttcttgccaaactgacttagcagagttcttgctgaatctggattttataaggcagaatgcagatgagcctgtgagaaggttctgaagccggactacagtttggtcaagcaaacaatcttgtcatggattcagtcatataaataagggtcacccagcccaggggaggtgccccaccccatctgttccctctccctccccacactgagtccgaacctttcaggctttgcccccttcacacactccaaatttattcttctacttctcttcctgcaggtaccagactccggccacccagcgcttacctgggactgctgggcctctgccccgtggggacctgtcctccaggaaacaaggccagacacaggagggcagggaggactcttctccagggccggtgcgccgtctcttcagccccatggcacttgacttaggcagagcctacagcaccctcaccccagtccctgcagccaccaggaggtggtccccctcatcccattagccatcaccgccattcacagaggtctcggactgaggctggcagggggagcaccatgacccaagatcagaaccctgttgtctgtgcctctggagaggtgggggcaggagctgagggagggtttgggtggagaggggagaagatgcagtagcaggagcagatgctggcaggtagagacaaacttttatgacctttgccttctgacctttgcctctggccactgctccaactaaaacagaatggccccctctgggaacagggcttcctatgggctgggaagcatggagcccccacagtgtggctatgcaggggagtgaggaccaggtgggggcaggcctgtgggggtcacagagctgggctaagcttcagagggaagtggcccctgggagggggaatggctggggttaagaccctgggttcccacgcccccaaaacagaagtagaattagggagaaaggacccccaagaccaaggacggcacctatcagaggagctctccacgggcaggaggtgtcccagggtgagggtggccaggacaggtctagggaaatgcaggtggagcaggacccagagatggattggagatgccggaggggaggcttcctagcgggagcggagacaggcactgcagacaagtgtcagcgggaggggctctgggtggggaagaagactgggacttggaggaagacctctccagggagaagggaggagggggaaggagaaggggaggaagtgggaggaggagagtgctcatcctggaagccacagcctcggagagaactttctagaaggaaggcatgaccatcagtgtcccaggatgctgagaggccaggaaaggtgaggcctcaaggcgccatggggttgtggtgaccccaagatcactgggcacagagcagggatggctgggggtggaaggggaggggcgcgggctgaggttctagggccccaaagccaggtgtgatgtggctctagggggagtgaggaaggggagaatgtccctctgagcgtgcctcttggggaaggcaggggttctggctggggcttctccactcccaggaaaggaggtggtgtggaaggagcgggtgggacggaggagagagcgccccgcggccgcaggaccagcaggtgggggaccagggtcagcgctgctggaggggccttagcgcgacaggactggccagagaccggggatgtggcacagaaagagttaaagggcaccccagggaccgccctgccggtccacccatgtcacccatgttggcccctactccagcccccgtctgctctgcaggggaaggaaccgggagccgcggtgggggcgactgggggtgtcggtctttccagaaaatcaggcaggcatcaggaaagaaggggcgagaacccggggacgcgagaggaagggggcgagggggnnnnnnnnnnnnnnnnnnnnnnnnncgcgtcccagggcgtcccctcccgggactgggacccaccgcgaccaccacctgctgggccagggtccgcgggctcaggggtctgcaggattagggtctgcggaaccaggacccgtgggacaaaggtctgtggggcgcgggtccgcggggtggaattcagcgcgccgagtctgcgtatggccggggtacgaggcgctccctgcgcagggtgggcaggaccgaagctcgccgggagctgcgcggagggcgggcggggaccctccggtgccgctcccaccccgcggggccgcccccgagcccgccctccgccgccgccctcgccctcgtcgccgccggaaagtttgcaccgaccccgatctggcagcgccgcgaagacgagcggtcaccggcgcccgacccgagcgcgcccagaggacggcggggagccaagccgacccccgagcagcgccgcgcggtgagcacctgggccgcggacccgaggggacgttggggagtcgacccggtggggacagagaccgcggggcgggcgcggcggggccgggggcgcggggagcggggagccggccgggcggtctccggggtccgggctggtgcgctcctcagtcccgtcagacacccccgttcccaaccccggctcggacaccacccggtcctgcaccgtcgggcaggtccaggggtctcagcccctcccccgttctctggtcctggggggcgcggctgggggcgggggtgtcgctggccgcctggcgccctgcggcggccacactgcagcggccacactccccactcagggccccgggccccgccgccctggggagcgcacaaagcgccgcggacgcgtccccgaggcgcggggtctcaccagcgctgtctcccctcggtgggctcctgccccgaggactgcccggtggcaccggcgcggcccaggatggggtgaggggtgtctgcgccccgcctggccgctcctcttccgcggcccacactggcgactttgaccccggcaagcgggtcactgccctgcccggctccggcccccccggcgccccaccacccggccgactcggccaccgggcttatgctccgactctgaaccgactgaccccggccccctcggcgcccgcatcctccaaggaccggccagggctgctctctgcccttggtattggggacatcagggttggggggtctgggtgcacccacgcctgccccgcccccacggggtgagggcgcagggatagggctttgtcaacagcctgtggcccctgatcccgccccggtgccctgaccttccactaccttctctggtttcacaaaaacatcccggctcccatcccggagctcctcaaagcgtctgagaggccccttgcggacgccctgggagccccgctgccttcctggaccagtggccgctccacccatcctgggggcccagctccaggtctgcgggtccctcagccgcccccagtgggaatcggtggagcctgacgcagccaggagcgcccaagagtcacgtgttctgccagggaggacatgggacaggacacggggtgccagccctgcaaagcggccggggcagtggagctcaggtggccctaagccctggtggtggctggtgtggcccggcaggcagctgtgggagggaggaagggggtggcatgcggtgggggtctagagaaggcgggcagggcacctcgggagcccccccattgggcacctcgggaaccccccacattgggcacctcgggaaccctcccattgggcacctcgggaaccccccacattgggcacctcgggaacccccgcattgggcacctcgggaaccctcccattgggcacctcgggaacccccctattgggcacctcgggaacccccacattgggcacctcgggaaccccccctattgggcaccttgggaacccctcccctaattctcagctgactccaaggcctgagaaggagcttggtcacctggactgtgaaggtggagggtggggtccctggtgggtcgtcccacctaccagctgtgtcgccggaagggtaatacggagcactgtggccccggggagccccgagtggcagctccacagctgggagtttctgtccactccttcagtcaacaaacattgatcctgggctgaccggggcccgggggtgtcagtgtctcctctcgggggagagggctgggtgagatcaacagaggagcctcccttcttcccttcaggctggtgtcaccttcagtgatggggcagggtccccacttgggaagttaaatcgtcgtccccgtcccaggaccacagcagcctcagccctgctctccaggccaggctctctcatgggtgctcagctggaaattggtccccccccggctccacccacccctgttggggtgaggagctggagtctccctacccatatgggacccaccacccgcagggaacggaggacgctcacacttctgcacctcctgcctcactatcagagacccagtggagaattgcctcccacctcacctcttgtattcagaggccctgacccctagggatccgggactaggggtgccctatggggagcccacctgtggcctgtggatgctgagctgtcgggggaatcctccaggatccccagccccaccttcccaaccttctgttgaggctgaggggacacagagccccactcctgggtcctgactgtttcaaagaaaggcctgggggactgggcagccaacccctccctcggctcgctggggtctccagactggctgcccggctggaaggtggggccctggcacgcgaggacctcatgtgtggaggcactggcttggggggtgctcccagtggctctagagtcaacatgacaggcatcgaatggctcctgtttctctggcagagttggggcagagccaggcttggccacgctgggctctaaggggctgtcattttgcccagggagctcctggctgggtggtcctccccccagggtgagcacgcgtcccccccacccccacttcgaggcgcccaggcagggaacagctcattggccagtgtccttcctccttgtcccccgcctgcatctccaccatccaccctgctccagctgccccttgtccctctccccgtcccctgcccagagccccaggtctcccctgcacccctgagcctgcccacctagcagtgcccctcgtccagggcccctctgggttgggggtgcacacagtggggagaggcggctcctgctgctcctcacccagcccggctcagtggccggagccgcccaggacagtggcagtagatggggctgtttgatcaggatcagggaagataaggccccttgcgtgaccccagagctggggacgccaaaactgcccctcctcccccacccgcctgccgctgtctccgccagggagaggcccctactctgtgggtccttcgccccagcaccaagcctgcatggctgctcacctggctcaggaactggggatcagcgacacacgggtcctgcctcccatcggcccctacatgagcccagggtccaagggctgcggttgggagctctttagcagtctgtgacgcaggtgcctgtccctgtcattcagctgtcacactgcttggggcatctcaggccccgttagcggggcagccctgggtggagctggccccacgcgggctcacccagccgctacctggaggaggctaaaatccaggctgtcccgtggcagccagcagtccaggcctgcccggaaaccctctgctccagctgcagccttcgcccatctccttgcccctctccccggcttccccctggcactgccttccagctggctggccctccatctgcccagccatccatccacacctcttattccatttgagggtgccccaaagaagagcccgtaacagcccgggggctcatagccagccactcgcgggaccccgcacatgcacgtggacccacaggaagaccctccctgcttctcccacagaattcagttggtgcagaaactgggctctgtagcaacgaaaggccgatttgtgtagctgttgccaccccgaactcccagctcagatgctggctgtggcatggggaccaggggctgtgactcccacagccctggcaggcaccacgggggatgtcctccccaccctgtgcccccaccctaggccagctcctcctccaagtcgacgcccgcagtgctaacctcaaaggactgtgcagccagcctgtggcgtcccatgggatccaggaagcccaaccgagccttgcacggcacccacgaggcacctaggcaccccggtgctgggcagggggcacacatgtgacacagacccctgagtgtgggccccacacacttggcctggcacagctgcaagccagcccagccactttgctcgctgtggcactggggccaagtgatggaaggtccaggcaccgccaccctcacgcttggcacattggctcaggtcagcctggcaagccagctttcccaggggctaagaataggtgaggaggatggtgaggaagcagccgggggctgtcaactgagggaggaggtcaccatctggggaggctggtcccccacccaagagcattgggtcaccctgcaggaaggtggctgccaccagcaatgagacgaggggctctgcgaccctcagagctgccagccagccagccctgggtggcaagagtgactcctcctggggtctcctccctcctatcgccctctttttttttttttttttttttgagacggagtctcgctctgtcacccaggctggactgcaatggcgcaatctccgctcactgcaagctctgcctcccgggttcacatcattctcctgcctcaagctcccgagtagctgggactacaggcgcctgccaccacgcctggctaattttttgtatttttagtagacatggggtttcactgtgttagccaggatggtctcaatctccagacctcgtgatccacccccctcggcctcccaaagtgctgggattacaggtgtgagccaccacgcccagcccccagctccctctttatccctaggaccctgaggctcagaggggcagcttcaggggaggacaccccactggccaggacgccccaggctctgctgctctgccactcagctgccctcggaggagcgtacacacccaccaggactgcattgccccagctgtgcagcccctgccagatgtgggaggcagctagctgcccagaggcatgcccccctgccagccacagcgacccctgctgctgttgctgctgctgctggcctgccaggtgaggactcacagcaccctcagcacccaggggccctcctgtgaggactgcacactgatggctctctgtctgcctgcctgcctgcctgcctgtctgcctgcctgtctgtctgtctgcccgtctgcctgcccatctgcctgtctgtctgcctgtccgtctgtctgtccatctgtccatctgcctatccatctgcctgcctgtctgcctgtccgtctgcctgtctgtctgcctgtccatctgtccatctgcctatccatctgcctgcctgtctgtcggcctgcctgcctgcctgtctgtctgctgcctgtctgtccgtctgcctgtctgcctgtccgtctgcctgcctgtccgtctgcctgtccgtctgcctgcctgcctgtctgtctgcctgcctgtctgcctgcctgtccgtctgcctgtccgtctgcctgcctgtctgcctgcctgtctgcctgtctgcccgtctgcctgtctgtctgcctgtccgtctgcctgtctgtccgtctgtccatctgcctatccatctgcctgcctatctgtctgtccgtctgcctgcctgtctgtctgcctgtctgcctgtctgtctgcctgtctgtccatctgcctatccatctacctgcctgcctgtctgcctgtctgtctgcctgtctgtctgcctgcctgtctgtctgtctgtctggttgcttgtgcatgtgtcccccagccacaggtcccctccgctcaggtgatggacttcctgtttgagaagtggaagctctacggtgaccagtgtcaccacaacctgagcctgctgccccctcccacgggtgagccccccacccagagcctttcagcctgtgcctggcctcagcacttcctgagttctcttcatgggaaggttcctgggtgcttatgcagcctttgaggaccccgccaaggggccctgtcattcctcaggcccccaccaccgtgggcaggtgaggtaacgaggtaactgagccacagagctggggacttgcctcaggccgcagagccaggaaataacagaacggtggcattgccccagaaccggctgctgctgctgcccccaggcccagatgggtaataccacctacagccccgtggagttttcagtgggcagacagtgccagggcgtggaagctgggacccaggggcctgggagggctcgggtggagagtgtatatcatggcctggacacttggggtgcagggagaggatagggctggaggactcacccgggaggcagtgcctgggttcggatgagggaggcagccaccactgggcagaggggggcaggtgtggcagcctccattgggcagagggagcagatgtggcagccacaggtttggcgatgcacctgggaaggatgaaaatggcattggggttcagcccccagagagggaggtgctgagagaaggtcacggagaatgggggaccccagtgtgggtttggggcacatttgagatggggggtctccaagggaaggtgtcctgcagagctgcaattcagggctgggctgggcgtgctagcggaggctggtccaggggaggtggatggtcaggtgaggaaggtggaggtcagatgggggaggtggaggtcaagtgggggagggagcagcccaggccatgtcctgggcgaggtgacggccgagctcaggcttccagagagaggagagaggcctgctgagggagccccttctcccaccctgccctgccctgctctgccctgccctaccctaccctgcagagctggtgtgcaacagaaccttcgacaagtattcctgctggccggacacccccgccaataccacggccaacatctcctgcccctggtacctgccttggcaccacaaaggtacccatagaggggaggaactgtggggggggcgggcccagggtggggctgaccccagcctccccccacacccccagtgcaacaccgcttcgtgttcaagagatgcgggcccgacggtcagtgggtgcgtggaccccgggggcagccttggcgtgatgcctcccagtgccagatggatggcgaggagattgaggtccaggtcagtgggcggcaggcaggcgcggtggggctggatgggaacgggcatgggggcccctgcctggccctcacaggccactgtaactcgcagaaggaggtggccaagatgtacagcagcttccaggtgatgtacacagtgggctacagcctgtccctgggggccctgctcctcgccttggccatcctggggggcctcaggtaggattccgccagcgcccggggcggccgcagaggacagggaggaggacgggcgctgactggctgtgcccacagcaagctgcactgcacccgcaatgccatccacgcgaatctgtttgcgtccttcgtgctgaaagccagctccgtgctggtcattgatgggctgctcaggacccgctacagccagaaaattggcgacgacctcagtgtcagcacctggctcagtgatggagtgagcccccctcggcggccccaggcaggtgggtgggtgggcagccaggcaggtggccacgtagccgcgctcacactgcacctgtaccaggcggtggctggctgccgtgtggccgcggtgttcatgcaatatggcatcgtggccaactactgctggctgctggtggagggcctgtacctgcacaacctgctgggcctggccaccctccccgagaggagcttcttcagcctctacctgggcatcggctggggtgagtgggctggcatgagagggggttaaggcaggctgaccaagcctttgggaccacagctgctgccccccacaggtgcccccatgctgttcgtcgtcccctgggcagtggtcaagtgtctgttcgagaacgtccagtgagtatgagcggctggacagcctggggagggaccggggggctggggtgcggcgctctggcctgaggcagggaggggccggggatgagcctggtgcctggggagggggtcatttgtgaccttctcccttccttttctgagacccgaattagatcctggcaaaatcgggacgggggtgctgaggggcggaggggctgggggctgtgccccagtatgtgagtggcctggcctcgcaggtgctggaccagcaatgacaacatgggcttctggtggatcctgcggttccccgtcttcctggccatcctggtgaggaaatgaagagccaggagcgcaccccaggcccctcctcccttggcgtcctgaggctgccccaggagacagcagcatcctgtctgagagcgctgggagggagccggcacccagacaggacaccaggacactggccagcaccctggacactgagccaggctgttcctccctggctgtgtgcccaccagccccagggctatgtggcccagggcctatcttgctgccaggcccacctgcaggagggtcaggtggggccttccaagggcacagagctgttccctggggctcgggatgcccctgactcgcacccttctcacacagatcaacttcttcatcttcgtccgcatcgttcagctgctcgtggccaagctgcgggcacggcagatgcaccacacagactacaagttccggtgggtgccgcggcagctggcgtctcgagacctggagaccctcagggccagagggcagctgggggtggggactccaagctccacgtggatggtgcgggccgagggtgggggcggtgggtgactcaggcgctgcctctgcaggctggccaagtccacgctgaccctcatccctctgctgggcgtccacgaagtggtcttcgccttcgtgacggacgagcacgcccagggcaccctgcgctccgccaagctcttcttcgacctcttcctcagctccttccaggtgcccgcccgcccgccggctcccccgcccggggcgcagtgtgccacccctgaccaccctgtctctccagggcctgctggtggctgtcctctactgcttcctcaacaaggaggtaggtgggagtgggggcatctgagaccatcagcactggccgtcggggtcaggggcagagagaggcacagggatgccagccccacccctgcccgggggttggaacacgtggggcccaagcctttccctccccctgctcttattgggtgcagttgccatggcgctgggtgtcaggcccccaggacaggttggcctcagccccatcgctacggtgtccaccgtgggggtccccaggtgtctgcagactgctttccgtggcgatgctgggtggcatagctgtgcccagcagggagcttgtgtcgctctgcacccctcagagcggagactgggcatctccgatgaggcccacagcaggtcccggtggggtggagaggacaggcaggccctaggactggcctgccccgtccccctccccaggtgcagtcggagctgcggcggcgttggcaccgctggcgcctgggcaaagtgctatgggaggagcggaacaccagcaaccacagggcctcatcttcgcccggccacggccctcccagcaaggagctgcagtttgggaggggtggtggcagccaggattcatctgcggagacccccttggctggtggcctccctagattggctgagagccccttctgaaccctgctgggaccccagctagggctggactctggcacccagagggcgtcgctggacaacccagaactggacgcccagctgaggctgggggcgggggagccaacagcagcccccacctaccccccacccccagtgtggctgtctgcgagattgggcctcctctccctgcacctgccttgtccctggtgcagaggtgagcagaggagtccagggcgggagtgggggctgtgccgtgaactgcgtgccagtgtccccacgtatgtcggcacgtcccatgtgcatggaaatgtcctccaacaataaagagctcaagtggtcaccgtgcatgtcctggaaagcagggctggaaatgctggggccgaagcagtgggggatggaacagcggtgggtggtcagcgccagtgcgggctgttgaagggtccccctgctgtcccagttcactcagagttggcactggaaccccggaggatcccgaaggcagccagcctgtgcccatctgagcaggtcctggccaccttcccatcctggttctggcgggcagtccccctggacgctttggccaccagagggtcaccattcaccagcagagacgtgaggggcacagtggctaaggcggcatgaggcatcacagtcccctgaccgaccccatcagcactggattcacccgagggcgtcttctccctggaggccgtgaggacactggcacctggctcatcggcccgcccttcctctgagcctcctggcctccgtttcatctcagctccagccccctcgggcaatttacaggccacgtagcagattgaagcgggaagaaatgggcctgaacattgccgcgggtccaggcgacggaggagggcaggttgcccaacttctgcacaggacccggggtgcgccacacacacgccagtcctcgtgccacacagagaggtccggcctacgccagtcctcgtgccacacagagaggtccggcctacgccagtcctcgtgccacacagagaggtccggcctacgccagtcctcgtgccacacagagaggtccggcctacgccagtcctcgtgccacacagagaggtccggcctacgccagtcctcgtgccacacagagaggtccggcctacgccagtcctcttgccacctcgtggtgggtgggcgccctgcttgccagccagggagcaccaggaaagagctgcctcctgcgtgctggacacaggaggtgcttcagggtggggtctcccattgtgtggggcccaacctgagtctaagggcccagggaccacacagcgggggtggagacaaattcagggtagaagctgtgaggggcctgtggtcagccccccggggggtccctgcagcaggcactgtgagacctactgaggtgtgtgcatgggctggggaaggagccagtcaggtgcccctgctctgaggagctgctgggaagtgctgctgggccctgggggaaggggtgctcacagcccctgcctgggccacgtgggctggagccgctcaggcagagccggactaattggggcaaatgaggggacaggaggcctctgaggaaaggtaaatagaattactcacccgccaggcactggggccctcctgggggggccctcaccctgccacccaccacagggcctgcatgcagcagggagggaagtgagctgattaggcaaggctggacccttctggggccctggggttgctgtgattgggacggcaaggccaggagacggtcccctgagctgcacctgctggaggcctgtgatctcagaccttaaggcttcaggccagctctacgcccctccggcctcaggtcctggctctcctctgagccctggatgcccgggtgcctgtgtgggcacgaggctgctccgagtcagcacacggaggtggacattctccttcatgccagctgagctcagggctggtgactgccctggggaaactgcccctcacctgggacctcctgacagccctccccattcccgagtccctctgcccttgtcctctttcacctctgtcccgccctcatccctaagggaactggagcaggctggtggagttgggtggagttggggactggcagggggtggactcacccaggcaataaacactggccctaaccaggcagtcctgcaggcaggtaggtggagggactgttttttttcttttttggagatagagtctcactctgttgcccaagttggagtgcagtggcatgatcttggctcactgcaaactccacctcccaggttcatgtgattctctgcctcagcctcccgagtagctgggattataggcgtgtgccacgacacctggctaatttttttttttttttttttgagacggagtttcactctcgttgcccaggctggagctcaatggcgcgatctcagctcaccgcaacctccgcctcccaggttcaagcgattctcctgccttagcctccctagtagctgggattacaggcaggtatgtgatgcccggcatcccaaaggggtatctgcaagagttgggtgctgtgtgtgcatggctgggaggaagatgactttgataccctggaatctggtgtctgtggacacaaaaatactactaaaatgagagtggagaccaggaaaaaggaagacatgaactacatgaaggaccaaatctaggagagtcagaagtgcgtcacaggaataggggaccttgagccagacagaaggctcagcagagacaccctcaaggggatgaaagggattgagtgcactaatatttagaggagagagttcaggacttgattagtgactagtacatagaaaactaaacaaatgaggctgggtgcagtggctcatgcctgtaatcccagcactttggggggccaaggcgggcgaatcacctgaggtcaggagttcgagaccagcctggccaacatggtgaaacctcgtctctactgaaaatacaaaaattagccgggcgtggtggcgggcgcctgtagtcccagctacttgggagcctgaggcaggagaatcgcttgaacctgggaggcggaggctgctgtgagccaagatggtgccattgcactccaccctgggtgacagagcaagactccgtctcaaaaaaaaaaaaaaagaaagaaaaaaccaagcaaatgaaaaaagaaggcaattaataattccaaagaaaagaaaaatttgggcagaaaagaacaaaacaagcagaatttaccatgactcagttctgaatacaaacacagacatcataatgtaaacaccaacactgatgcaaccagaatcatgggagaaaaaagatctagggagggtggtggacgggaatatcacgtatgtactgggggtaggggagagaacaaaatgggaaaaatcaagaataattcacgttagaaataaaaatacagagcaaaatttaaaaatgcaaagaatgaggtgaagagttcaaagtggtcacctcggggccgggcgcggtggctcacgcctgtgatcccagcactctgggaggctgaggcgggcggatcacaaggccaggagtttgagaccatcctggctaacaaggagaaaccccatctctactaaaaattagccaggcgtggtggtgggcgcctgtagtcccagctactcgggaggctgaggcaggagaatggcgtgaacccaggaggcgcagcttgcagtgagccgagatcgcgccactgcactccagcttgggcaacagagtgagactccgcctcaaacaaaacaaaacaaaacaaaaaaacaaagtggtcatctctaggcaaggtgggtgggagatggctagggctgcaggtccactacgtgagctggctcagcctatccccagacaccctgcactcactcagcccggggtcctccccctgcactcactcagccccgggtcctcccctgcactcactcagccccgggtcctccccctgcactcactcagccccgggtcctcccctgcctgctctttctctgaccctgccctccactgttcctttttcttctttctctccctgttgtgtccaggaaccaggcaccaccctcatttcttcttgatcaatctttaaaaaccagcagtgctcagctaactcttcatctatctcccccgacctggggctctgctgaatccacgctttagacccagctatcagctcggcatgtacagctggatgtccacaccgagctgctcaccctgtccccagcttcttcctcccactgtccactgcagaagcctcctaacaggacccctgctgctaccccggaccctgcaacccattcccacacagcagccagatgctttgacacccgaagtctcctatgaatccgatgaggcctctgcaccacacctcattttacagaagtacaggggaaacaggggtctgttgacaccacagagatgcagctggccaaaggcagaatgtggggtacacgactgtcaaacgccaggggtccttacacgaatggtggaaaaagaggggcatgttacggatggaggctcgggacacatgggcgccgccttcccatgctgccagcaacccaccaggaacctatta

SEQ ID NO: 12 - DNA, 3182 bp, Hepatitis B virus
aattccacaacctttcaccaaactctgcaagatcccagagtgagaggcctgtatttccctgctggtggctccagttcaggagcagtaaaccctgttccgactactgcctctcccttatcgtcaatcttctcgaggattggggaccctgcgctgaacatggagaacatcacatcaggattcctaggaccccttctcgtgttacaggcggggtttttcttgttgacaagaatcctcacaataccgcagagtctagactcgtggtggacttctctcaattttctagggggaactaccgtgtgtcttggccaaaattcgcagtccccaacctccaatcactcaccaacctcctgtcctccaacttgtcctggttatcgctggatgtgtctgcggcgttttatcatcttcctcttcatcctgctgctatgcctcatcttcttgttggttcttctggactatcaaggtatgttgcccgtttgtcctctaattccaggatcctcaaccaccagcacgggaccatgccgaacctgcatgactactgctcaaggaacctctatgtatccctcctgttgctgtaccaaaccttcggacggaaattgcacctgtattcccatcccatcatcctgggctttcggaaaattcctatgggagtgggcctcagcccgtttctcctggctcagtttactagtgccatttgttcagtggttcgtagggctttcccccactgtttggctttcagttatatggatgatgtggtattgggggccaagtctgtacagcatcttgagtccctttttaccgctgttaccaattttcttttgtctttgggtatacatttaaaccctaacaaaacaaagagatggggttactctctgaattttatgggttatgtcattggaagttatgggtccttgccacaagaacacatcatacaaaaaatcaaagaatgttttagaaaacttcctattaacaggcctattgattggaaagtatgtcaacgaattgtgggtcttttgggttttgctgccccatttacacaatgtggttatcctgcgttaatgcccttgtatgcatgtattcaatctaagcaggctttcactttctcgccaacttacaaggcctttctgtgtaaacaatacctgaacctttaccccgttgcccggcaacggccaggtctgtgccaagtgtttgctgacgcaacccccactggctggggcttggtcatgggccatcagcgcgtgcgtggaaccttttcggctcctctgccgatccatactgcggaactcctagccgcttgttttgctcgcagcaggtctggagcaaacattatcgggactgataactctgttgtcctctcccgcaaatatacatcgtatccatggctgctaggctgtgctgccaactggatcctgcgcgggacgtcctttgtttacgtcccgtcggcgctgaatcctgcggacgacccttctcggggtcgcttgggactctctcgtccccttctccgtctgccgttccgaccgaccacggggcgcacctctctttacgcggactccccgtctgtgccttctcatctgccggaccgtgtgcacttcgcttcacctctgcacgtcgcatggagaccaccgtgaacgcccaccgaatgttgcccaaggtcttacataagaggactcttggactctctgcaatgtcaacgaccgaccttgaggcatacttcaaagactgtttgtttaaagactgggaggagttgggggaggagattagattaaaggtctttgtactaggaggctgtaggcataaattggtctgcgcaccagcaccatgcaactttttcacctctgcctaatcatctcttgttcatgtcctactgttcaagcctccaagctgtgccttgggtggctttggggcatggacatcgacccttataaagaatttggagctactgtggagttactctcgtttttgccttctgacttctttccttcagtacgagatcttctagataccgcctcagctctgtatcgggaagccttagagtctcctgagcattgttcacctcaccatactgcactcaggcaagcaattctttgctggggggaactaatgactctagctacctgggtgggtgttaatttggaagatccagcatctagagacctagtagtcagttatgtcaacactaatatgggcctaaagttcaggcaactcttgtggtttcacatttcttgtctcacttttggaagagaaaccgttatagagtatttggtgtctttcggagtgtggattcgcactcctccagcttatagaccaccaaatgcccctatcctatcaacacttccggaaactactgttgttagacgacgaggcaggtcccctagaagaagaactccctcgcctcgcagacgaaggtctcaatcgccgcgtcgcagaagatctcaatctcgggaacctcaatgttagtattccttggactcataaggtggggaactttactggtctttattcttctactgtacctgtctttaatcctcattggaaaacaccatcttttcctaatatacatttacaccaagacattatcaaaaaatgtgaacagtttgtaggcccacttacagttaatgagaaaagaagattgcaattgattatgcctgctaggttttatccaaaggttaccaaatatttaccattggataagggtattaaaccttattatccagaacatctagttaatcattacttccaaactagacactatttacacactctatggaaggcgggtatattatataagagagaaacaacacatagcgcctcattttgtgggtcaccatattcttgggaacaagatctacagcatggggcagaatctttccaccagcaatcctctgggattctttcccgaccaccagttggatccagccttcagagcaaacacagcaaatccagattgggacttcaatcccaacaaggacacctggccagacgccaacaaggtaggagctggagcattcgggctgggtttcaccccaccgcacggaggccttttggggtggagccctcaggctcagggcatactacaaactttgccagcaaatccgcctcctgcctccaccaatcgccagacaggaaggcagcctaccccgctgtctccacctttgagaaacactcatcctcaggccatgcagtgg

SEQ ID NO: 13 - DNA, 3318 bp, homo sapiens
gtgatgcgtagttccggctgccggttgacatgaagaagcagcagcggctagggcggcggtagctgcaggggtcggggattgcagcgggcctcggggctaagagcgcgacgcggcctagagcggcagacggcgcagtgggccgagaaggaggcgcagcagccgccctggcccgtcatggagatggaaaaggagttcgagcagatcgacaagtccgggagctgggcggccatttaccaggatatccgacatgaagccagtgacttcccatgtagagtggccaagcttcctaagaacaaaaaccgaaataggtacagagacgtcagtccctttgaccatagtcggattaaactacatcaagaagataatgactatatcaacgctagtttgataaaaatggaagaagcccaaaggagttacattcttacccagggccctttgcctaacacatgcggtcacttttgggagatggtgtgggagcagaaaagcaggggtgtcgtcatgctcaacagagtgatggagaaaggttcgttaaaatgcgcacaatactggccacaaaaagaagaaaaagagatgatctttgaagacacaaatttgaaattaacattgatctctgaagatatcaagtcatattatacagtgcgacagctagaattggaaaaccttacaacccaagaaactcgagagatcttacatttccactataccacatggcctgactttggagtccctgaatcaccagcctcattcttgaactttcttttcaaagtccgagagtcagggtcactcagcccggagcacgggcccgttgtggtgcactgcagtgcaggcatcggcaggtctggaaccttctgtctggctgatacctgcctcttgctgatggacaagaggaaagacccttcttccgttgatatcaagaaagtgctgttagaaatgaggaagtttcggatggggctgatccagacagccgaccagctgcgcttctcctacctggctgtgatcgaaggtgccaaattcatcatgggggactcttccgtgcaggatcagtggaaggagctttcccacgaggacctggagcccccacccgagcatatccccccacctccccggccacccaaacgaatcctggagccacacaatgggaaatgcagggagttcttcccaaatcaccagtgggtgaaggaagagacccaggaggataaagactgccccatcaaggaagaaaaaggaagccccttaaatgccgcaccctacggcatcgaaagcatgagtcaagacactgaagttagaagtcgggtcgtggggggaagtcttcgaggtgcccaggctgcctccccagccaaaggggagccgtcactgcccgagaaggacgaggaccatgcactgagttactggaagcccttcctggtcaacatgtgcgtggctacggtcctcacggccggcgcttacctctgctacaggttcctgttcaacagcaacacatagcctgaccctcctccactccacctccacccactgtccgcctctgcccgcagagcccacgcccgactagcaggcatgccgcggtaggtaagggccgccggaccgcgtagagagccgggccccggacggacgttggttctgcactaaaacccatcttccccggatgtgtgtctcacccctcatccttttactttttgccccttccactttgagtaccaaatccacaagccattttttgaggagagtgaaagagagtaccatgctggcggcgcagagggaaggggcctacacccgtcttggggctcgccccacccagggctccctcctggagcatcccaggcgggcggcacgccaacagccccccccttgaatctgcagggagcaactctccactccatatttatttaaacaattttttccccaaaggcatccatagtgcactagcattttcttgaaccaataatgtattaaaattttttgatgtcagccttgcatcaagggctttatcaaaaagtacaataataaatcctcaggtagtactgggaatggaaggctttgccatgggcctgctgcgtcagaccagtactgggaaggaggacggttgtaagcagttgttatttagtgatattgtgggtaacgtgagaagatagaacaatgctataatatataatgaacacgtgggtatttaataagaaacatgatgtgagattactttgtcccgcttattctcctccctgttatctgctagatctagttctcaatcactgctcccccgtgtgtattagaatgcatgtaaggtcttcttgtgtcctgatgaaaaatatgtgcttgaaatgagaaactttgatctctgcttactaatgtgccccatgtccaagtccaacctgcctgtgcatgacctgatcattacatggctgtggttcctaagcctgttgctgaagtcattgtcgctcagcaatagggtgcagttttccaggaataggcatttgcctaattcctggcatgacactctagtgacttcctggtgaggcccagcctgtcctggtacagcagggtcttgctgtaactcagacattccaagggtatgggaagccatattcacacctcacgctctggacatgatttagggaagcagggacaccccccgccccccacctttgggatcagcctccgccattccaagtcaacactcttcttgagcagaccgtgatttggaagagaggcacctgctggaaaccacacttcttgaaacagcctgggtgacggtcctttaggcagcctgccgccgtctctgtcccggttcaccttgccgagagaggcgcgtctgccccaccctcaaaccctgtggggcctgatggtgctcacgactcttcctgcaaagggaactgaagacctccacattaagtggctttttaacatgaaaaacacggcagctgtagctcccgagctactctcttgccagcattttcacattttgcctttctcgtggtagaagccagtacagagaaattctgtggtgggaacattcgaggtgtcaccctgcagagctatggtgaggtgtggataaggcttaggtgccaggctgtaagcattctgagctgggcttgttgtttttaagtcctgtatatgtatgtagtagtttgggtgtgtatatatagtagcatttcaaaatggacgtactggtttaacctcctatccttggagagcagctggctctccaccttgttacacattatgttagagaggtagcgagctgctctgctatatgccttaagccaatatttactcatcaggtcattattttttacaatggccatggaataaaccatttttacaaaa

SEQ ID NO: 14 - DNA, 78001 bp, homo sapiens
cagattccgggtctcatccctagaccaaagatatctgaatcatttggcgatgggtccaggaacctgcattattcaacacacttcccaggtgaccgtaaatgtcaaaagacaaaattacaacaaacttaaacatcttaattggcttcattcatgattctagaatcgggcaagacttcattcctcaaaatagcacaagtgtcccaatgagctgagcagaggaggttggttttatagacagaaaagggctgaaaaaagcagaaacaaagaacaaaaagcagattggtcatttcaaagttactttccttgtaaggcaggaacagggaaacagaacaagagagaaataactgattggtcgcatcgggttacttcaggttactttttgttgtaaggattaaagcaaagggaacttcattatgttgattaaaacggtctgcttgggaaatcagggtgtgtatctctcttctgattttgtgaaaggttatcagtctgatgatgtagaactttagcatgagtgactccattttgatttttagtctagtctgttgagaccctaatgccagaactttttttgtttgtttgtttcgctcttgttgcccaggctggagtgcagtggagctatcttggctcactgcaacctctgcctccagggttcaagcgattctcctgcctcagcctcccaagtagctgggattacaggcatgcgccaccacgcccggctaatttttttttttttttttttttttagcagaaaccgagtttcaccatgttggtcaggctggtctcggactcttgacctcaggtgatccacctgcgtcggtctcccaaagtgctgggattacaggtgtgagccaccacacccagcccttttttttcaagacagggtctctctctgccacccaaggtggagtgcagtggcgccaaaacagctcactgcagcttccacctcctgggctcaggtgatcttcctgcctcagcctccccagcagctgggccccaccacaccggctaattttttaacttttagtagtgacgaggtctgattctgttacccaggctggtctggaactcctggcctcaagacatccgcctgcctctgcctcccaaagtgctgggattacagatgtaagccaccgcgcctgggctcctatgatttttatttaacataatgcaccatggaatttgtgctctgcttagttcagtctgagcaggagttccttgatacttcgggaaacactgaaaatcattccatccccatccattcattcctgcagcacccaagtggaaattctgcgtttcagacagggacactacccttagagagcagtgggcttccccagcagcgtagtgaaacatgatactcctgagtttcatgaaaaaagggcagacatctggccagagctgggaggcaggaaatagagcacggtgccctcctcccatactccagcttggattactgaggctggggcccaggccctgcaggaaaggaggtgcatgactactttaaggccactcactctgtgactcaacgggccgggtcggggctggaactcaatgccctcccgggcctggagagcccacgcgccgtgggcggggctcccggggtcgcctaggcaacaggcgcgcgccgcgcccgagcccagagccccaaagcggaggagggaacgcgcgctattagatatctcgcggtgctggggccacttcccctagcaccgcccccggctcctccccgcggaagtgcttgtcgaaattctcgatcgctgattggtccttctgcttcaggggcggagcccctggcaggcgtgatgcgtagttccggctgccggttgacatgaagaagcagcagcggctagggcggcggtagctgcaggggtcggggattgcagcgggcctcggggctaagagcgcgacgcggcctagagcggcagacggcgcagtgggccgagaaggaggcgcagcagccgccctggcccgtcatggagatggaaaaggagttcgagcagatcgacaagtccgggagctgggcggccatttaccaggtgcgggagcgccccggagcgtggcgggcccttcgcttaggccgcttgaacatcccctcagacctccaggccccagactccctctgggtcttgccctctgcctcgctcctactgcttgaggattcgatgggacagcgacgcactgcgtccccccaccctttgtccccggggcgggcgtgtttctcgccgcagcgtcggagcccccttcgatcccccacctcccttctgttctccagctcgggtgatctctcaagccgggggaccgccggtctgtgctctcaacgcgaatccctcgcaccccgaccccgccccctgcctgtccactctttgtcccctggggtgatttagcacccccactatttccttttctggagtggaccacctcagactctcttcctttgtctccctgggggaaaaggttactccccccgtccctccttcacatttcctttcccctagtctcagtgtgcgtcgagtcccagagatgacagtcccctttcccctttctgttcattcatttattggataggagttggcaagcttattctgtgctaggcaccgcttaggcattggaggtggtgtttgctaatcaggacaggcaagatcctagccttagtggggcctagagtcgaatagggcaatcaaacacaaaagcaaataatttcagatagtgacaggtgctgtgaagagaacgacttcctaacggggtacagggtgactgcatagaaggccggctgtcttagagaaggggatcagggaaggcctgtcaaaggaggagacatttgctttgtgagctgaaccaagaggagcagaaagccgtgagaatatggggctaaagaaccttctagccaggaggcctgcggtacccactccattggggccatgatattattctttcaggcagggactcaggaaggttaacgttttaaccctctctaaaatagcatctttcctcaatgagcagcttagtctttggtcgtggcagagatgaccttgtcttaggagtcatctccttgtgtgttaaaaagttaggaaaggagggtttctcatatatctataaaacaagtagttaaaaacacaaagagctcttcctttcacaagcagctgaataagatacatactcccaattaaatgtcattgcgggggttgttaagattaactaaaaccacacttgcacagtatcttaaataagcgatatacagaatagagagattttgttacttgtgtaaagggagacagcagatgattctgttttcagcttataggctcaaaaggcaaattgtgagatccatcagctgtagtattaaaatctattttgagctccgcttagaaaggaaaaaaggtttaagcagttctttggtatgcttgactaacaaaagcctttttttttggcagccttgattttcatgtggatttacatcaagcttatttgacaggattctttttatttggactgtagtgtgtatattagtttctgctagactaatatttctaaccactgtaatctatatactaataagtatgattgatcagtatataaaatttgtatgccatatctggtctctgaattagctgaatgaattccataagggactttgagactgtgtagacaaattttctgcatcagtttaatgcagtagagtctaaaatgtctttaaatgaaaattgttggtctgaagtgttggagttgattatgatacaccccatcacagtggaagcattgtggagagaagtcttttccactgaaattgactgagttgacaacaagaaatacgtattgtaacttagttcttagttgaattttatttcttacaattttaagccagagtgggttgacctgtcacccaagcatggttaaaattgtattcagcatgcaactagcatggagtgtgtcagtcttcaattcatttccttcattgttcttaagtttttctgccacaattaaaccccacaagttagtcaaggtgttgagattttcactgcttcttaatggattgccacattccctgaggtagtttcttttggtcttagagaattgtcagggccagcttttctcacctccactgtatggatatttttcttttctaagatcttgaaatcagaagcttttctcctaagtgtaaaagtagctctttgtcatacaactgtagcgttttctgaaacagagttcagatgaccttgagtctaaagtggctaactttccaaggtgtgtatcgctttaccaaaaccattatttttcaaggattcaaagaatgtgtttacaattgatagaaaatggaagtttaaaaaaattaatactttatagcatgttgaaatgagggcagccttatacaaagtcatactttgagcttgcctagcctattgtgatcagagaataatgtaatttttgcttacaacttggtaagcaggtcagttattctaacttattttctgattagaacaaaaagatgtaaaaacttgaaaactattgggaaaagaacaaagagtgaagaggacttttgagtgctgaggaatgtggcagcttggaaaacaaactttttaggcagagattctttgctaggtcagtttgataaagtgagcataaccgtatttttaatctttaatgctaatgaatagcatagatgctaataagcatctaggtctataaaaagtcagctttgatagtgtatatagatggctttaaacattgttttctagcatttaaacactttcaaatcatccggttgcttgattgggcctagctgtctaagaggagagaatgagcccagatgaggaaaagagattgattttactgagctagaatgagaggagagagggttgagtgaatgaaaagaatagctcatgtgctcccctccatctgtagtttaagaggggttgggtccggtgttttgcttgttttctcgtctgtaaattctttgattctctgacaccactcactatatttcattgtgaatgatttgattgtttcagataaaggggactgcaataataccttgtgacatgaaggcaagatttattcatgttagaggcaggctttgtaaaatgggccactcttccaattgacatttgtttttatagctgttttcattatgaaatacaatctaatgcctgactaggttaaaaccatgttgtaacaatagttcactaaaattccttactgatatacagcttatgttgttatattccaaaaagatgaatattaaaatttgccaataatgtttatttaaatactattttcttcagaggaaaaaaaactattttatgcaaaggagaaagatctatacactatgactcacttcacttaaaaaaaaaaagactaacggaaatgacatggagagactgggaagttctagtcatcttgagtgacccattagatctaaatgttcttgtttagccctggtttgagtgaactaaatttaggtgtctgatcagtactttggaaatggtgtaaatgcctttgtaattgtctggactgatattagattaactgggagcacaagtagaaatagtgaaggaaagaactttttgctattgttatttgacatcactggcatatttataggaatactttggtgtttttggaagtaagtaaaccaaccagtggttctaaaaagtcagctgggggataatggtaatgccgctgtttcttagctgcaagttatctgccgttacttctcctccattttgcattttatcttgaatagctcctcaaaacctattaaaatacctggtattgaataatgtaattgaatgtgtactgaatttcacagtggaaatgaataagaaatttcctgtggaggttttttgacttagctactgaaataacggccttttgttgtgtgattctttcccttttctctttgttaaagaaaactgtcttgtgatcttgtagattacagaatccttttggcaatttctgttcctagcactgctttttctttctttctttcttttaaatagaaatggggttttgctgtgttgcccaggttggtcttgaactcctggcttcaagcgatcctcccaccttggcctcctgaagttgggattgcaggcgtgagcaggtactttttctgaggcctgcctgagcctatatatattttgcacaatttggcattcctccctacagtgtttatgctgatttgtttctggtaacaactaatactggcaaatcggctgggcatgttactttatgctgcccatattcaggaaaattggaattctagctgggtcattgttcccagatgatgtagtttggcaccagccattccatgttcacattttgagtatccaggagggctggggactttggagtagttggtgattccctctgccacatttcactggttggtcactatggcatcctttccaccacactagtagtctaggttctcagatgttgcttatgagcctgcaatggtttctagtttcacactgcagaaatgagtgaagccggttacccgttaatatggtcccatcatcactagagtaattcattgttctaaaaccagatctgagtctctcactcctctgcaactacttctgattctttcataacacttgtaaagtccaaactcctctttagcatggcagccagcttccagtccttccctcctatgtggcttccattctagccagacaagaaagggcagcgttctccaaactcatcctcgcccttcattcctctataccattgctgagcactttgttgaggatgcctctcccgttcaatctagcttgcatcttccagctcgaatgtgtgcttccttgcaccagagttttgttccgtcacctgtgtgttttcatacaagctggcacatatctcttctaaagccctgctgtcattgtagctgcgtctttacaaacattttttttttaaatttttataaagtcaaggtctcactatattgcccaggctggtctcaaactcctgggctcaagtgatcctcctgccttggcctcccagagtgctgggattataggtatgagacactgtgcccagctgtagctgctactttatatcccaggtctatctccaatggagcccaagcttcctgaggccacctgttgtatctttctcattcatcttgaagtcctctgctcctggcacagagtaggtacctaacaagagttgggattgaattgatggtcagtactttgctagcctgatggtataaagatgtacaaaacatgttcctggctcccactctaggggggcaatgatggaaacaaatagattagcccacattagtaccaatagtagaggtcactctgggagaaggcccccaccacattttgagtcatggcctaatgaggtaatttagtattgcctgctgcagtggctttggaagaaaggctggcattcttagccagtagaagctgataccactgatttgtttcacagaagctttaaatataacaataaatttgtgcttggcctacggtgaactttacaggcaacttggaggtaatatgtttgtctctctaagaattgttgaattcctcttccctcatccctcctgactggttctcacaagcctagcgggcctttgcatgtggttggttcataaaatactttttgattttgggatataaaatatagttctccataaaataacgactgttaccaagtctttgattttttttttcaaactataaatggtaatgacattctttggcctttgatcagaccacccttaggggcaagagagtagtttcatgttttgctttttctagtgtcccctgtgtctgggtatagttgcagtctcagctgtcatactaacagtgctgagtgagtcccttactttctttgggttttggtttctcccttgtaaaaatgatcctggactaactgatcattaagttcaggtcaagtaataaaaatccttaatgtactcacaaatacaatttaatgttcctgaataatccttgtaaaaactgcagcagttactcagttttgtaaggtgtggttgggtactattaggctcaaaagtttataggagctttgtgagtatagttaacaactcaaaagaatggggtgttttttcccgaggggcatgaaatgtttttgataaatagagttcatttgacttggtaatgtggaaaatgagtagccctgacacgtacgctatgcttttgcagtttttctctcaagtagcaattgggtggcttttcctgtaaaagatagaggaactgattcttgagaatttacgaaagcttcaaccctaactaggtatgcaaagaatagttgccctttatgttgtaattttaggaagaaacctacatctggtctaagtttcatttgaataatatgatagtttacacatctgccatatttgagaagaaagtacctaagtctccagcattttagaaataatgctttactttgtgtagaaatggtctttagagtttaatagctgctgccctctcctttttcaaagcagcttgacataatcatgagtatcttgctgacagcttgtaaattttgattgtatgaaaactgaaaataagaccatttcacatggaagattccctcctgccctgaaacagccaaagaaaactgtagccatcaaatctattgatctctgggctttggtacaagtcacactactacaaataaaataataccaagtacttataaatgattttcagtccttttaaagtttatttttttaatattttttttgagatggggtcttgctgtgtcgtccaggctggagtgcagtggcacaatcttggctcactgcaacctccacctcctgggctcaagtgatcctcccacctcaggctcccaagtagctgagactacaggcatgtgccatcacgcccagctaatttttgtatttttttggagtagagatgggattttgctgtgttgcccaggctggtcttgaactcctgggcttaagccatctgtctgcctcaggctcccaaagtgttgggattacaggtgtgagccactgtgcccggcccagccctttttttaagagaaaaacgtatgacatcgttcgatttactgagtgcttatggttttactaaggcagtaaggttttatggataccctatggtaattagatagaattagtgctctgaagtcagctctgtaatatggactcagagtaaacatggcaaagggacacttaaggtctgcattttctctgggaaataaacgtattctttactactctgaatctagtgctgggaaattctaaatccttcttgaggattaaccacttgaagtaaagttttgggtcccaagtaggcttgtgtccctgtctccttctctttacttttcagatgtttcttcctagagactgaggtatattttacttttacagatgaagaaggaagcctcggctgtgtttgtggcttttgtgggtgagcaacatcacttgcaaagataagatgagcatagcaaaactaggctttcaaaataatttttaaaaatttcttagtgattagaaaaggaaaactcttcccttgtctctgttaagaaacgtttttcgacttttttcctttcttaatggatcttttattggcacttctcttccttttgcagaatcttacttaaaagtcactacgttacattacagcaaacagcttagctaatttttatccagatgggccccggttacaggattgtacactattgcgaatttcttacaggaaagtgaacatcaagtaattattccaaatagagttctcttaagaacgtgagttacttaaaaatgtctaaggatgaagtcacttctgaatataacttcactcaagagaacaaataagcaaactgcatttagcataacatggtaaattagctttaactctccttgatgtttgaacatttgtcgctgttaactactgtttcacttttcaaatagtcagggcttagtttgcttctgtaaggataaagggaaaatacgccttcactgagtcataaatatttttgtggctaacttttgcacagagaaaagaggcctctaagaaggtacccagtgaatttttttttcggggcagggagagaatatgtcattttttggtttgttgttgttgttgtcattgttttgctttgttgtttttactctgaactgaactgtatcttgacagcacttttgaattaagagcattactcttattgttctctactacctggacgccacctccctgttgccatagtgttaaggatcatgctccgaggtggggtgaggcagaatggggccaagatcagaaagttacattaagctacatcaggtttatacaagcataaaaccaaatttttggagcagtccccagaatacaacctggtttagccacacctaaaggttgctcttgaatattccttgagaatccacatccctagaatgctgggtttcaatgggccctttatgtacctatcatggtgtcatttctgagcatttctaaatattccttcatgtcttactgacagtttttcttgaataaatcttaggaatattagtgccattatcagtattttgtttggtctgttcacaccacaaataactacccaggtctgctacttgcccctatttctctacctgctaatgaaaatgcttttgaaagtttgagtaacagtattggagtgtgcacagtggtattggtaggttctgtactcatccttaaccacttgttttcatcctttgtgagcttgaagtttctccaaaaaatttatcacaaaacttatcagacatagttaatacactcagagagagaatcactgaaaaagtagatgtagtttaacaaacccagtgccttttttttacccatgaatacatatttgtcaactaaacctcattttgcaacttgttccactactcgaatggtaacaaacttttggtttcccaatagatttggaagatgttgcttttgaaagtaggaaatagatggctttagaagatggaagaatattttgtttgaagtgggagcgtggtatgtccttagctgtctgtgaaatgcagctgaagatgggtgtgggccttcatctgcatttcccatcttcagtttgaggaggtagttacccttctaaccacttaagaactgcatggtacatgctgttttatttacagggcaaaactgtgctcccgtagtttccctggtgcttgccttcacgttaacacagtgtcatcgtttggcagtgtttatgtgccagggtccatgttagaaggaggaaaggtatagcgaagttaaagggtgcagttggcctcccacctttagttttgtaagtgcctttaaagtttgatttttgtaggttgatcataaggaagtgataagtatgttaggttatttgtggtttgagctaattttagtctctttttacagcttgctttgtatcctttgccattaaaacatgctttctagaaagacaacttttgaatgtaggacacagtctatattctatacttggctacatttcaaaaaatattttctcagtactttggaagttggacagttggaagcatagtgacagtatttaaaaatctttgattccggccgggcatggtggctcacgcctgtaatcccagcactttgggaggccgaggtgggtggatcacttgaggtccggagttcaggaccagcctgaccaacatggtgaaaccctgtctctactaaaaatacaaaattagccgagcgtggtggtacatgcctgtaatcccagctactcaggaggctgaggcaggagaatcgcttgaatctgggaggcggaggttgcattgagccgagatcataccattgcactacagcctgggggacaagagtgaaactctgtctcaaaaaaaaaaaaaaaattaagtgatttctttgctttgtgacacttctacttttccagcaagtaaattatattctttcatacaggtatgaaattcttgttccaagctagtggttaaaaaggcacagttgatattagaggatttgtaaaagattatgaccacgcctgcaatgtactgaagcaaggctttgctgggctgtgtataggaaaccttccccagcctgtgcccttgcttgatagaacattttgctcctaagggtaggtgcctgtatctgtctccagtactggttagtttcacacagaacagttgtgtttcagagctttagtctcaagctgccctgctcccctgaagcagccaccctgagcatgtgcactcacaggaggggacatgtgaggtcatggaagaagacgactcaggaagaagaagacttgggtttgggttctgactctgcctttgactgttgtgggattttgaggagttgcatacaggatctgtaaaatgtagtcattagactagactagacagccatatagcattacctagatgtaactttctacaaagacatggtcacaggagaagaccagagggtggggtgatctttctggaaaaattggggcttcatgccttactcatgctagatatggtagcattatatggctgtgcctgatccccctaatctaaaagtgggacagaactttaaaatttcatattaactcaaattaaaacttgaaaaaaacccattatttccttaaaaataataaaatgccctgtgggggcataagtcacattatattttaaaattcctgaatgccacatggatgaatgtagttccttttgaaattcttcttttgtctaaagaggaatgttggattttgtaattggactaaaaaatcttccatttgagagagaaacagtctgctgcatgttctacccttgttcaggataaaacccactaatagctaacatttattgaattctgtgttgtgcctcaggcactgtgcaaagtcctttacatgcaatgctgtttattatatactgtcaattggtctataacagcaggaaatgtttcaggaggacaatgaggtcccagaccctcagtcttctcctgtgtcctggattcagcttcacaatagcactatggcagtgtggccactgcttcagcttccacatacatggctgtgaagagagacaggggattgtgctaagcctccccgatttattaggacataggaggagagagtttgtagtttttgacctttgcctagttttctaacctctttcctagatgtcacaaattggccacccacagtcatattttgcttgcttcacgcaatgctttttaaaaaagagaagagtttaatttgtgccattgtttataaatgaatcaggagaaatgacatgcaactctggattctggcctctcttgaaaaatctgaaaatcacaccgtctgagcttacactggcagtggtctgctggactgagggacacaactccttttggatgtacatgtgtgcgttgcagagtttaccacagtcccacagtgggtcacactgtccttgtcggtgtacactacctagcacttgagtttgcaacccctaccccaagctgagttttctcgtcaagcttgatgttaatgttatgtgatgcttggccttgtaggtatttggtatattatcgttagataaaattgaagcaaagggctaaagggttggtggcctgagggagtgcccttgacagtaaagtctaggataaaatcattggccaggtactccttcccttcccgcccttcctcttttctctttatcctcagcctccttctgctattttgaggaagttagaagccaccaccattttttcccacctcaggcaactgagtgtggctgtatttctgtcccatgttcagttatttccaggaactatttttgatgaccaacttgaagttacattgggtgggcctaatgggggctgataaaagaatgaggtgaccaaatatgcttgcactgagacggctacgaagtaaggtttttaatgacttgctttgtgacttggtcaggagtgataccatttgtcatgtgtccaacttcatgactaaatggttgctctaccttatcctcatagctataataaaataaaataaatacatacattgcagggaggaatgtatcttgttaaaggtctctcccttttagcaacaaaagtacatattatgttgtagaacatgctttttctttgatccttcttgaacacctattactctatagaggtatgttgtgtatggcaaattagaacaagcaatagataaggatgattctttaccattataacccagtcaaggtctttgtcctaagttttgtacctttctccagagggaaaggtatttgtatttatttatttatttttgaggcagagttttgctcttgttgcccaggctggggtgcaatggcacgatctcagctcactgtaacatccgcctcccgagttcaagtgattctcctgcctcagcctcccgagtagctgggattacaggtgcctgccacgatgcccggctaatttttttttttttttttgtatttttagtagagatggggtttcatcatgttggccaggctggtcttgaactcctgacctcaggtgatccatccacctcggcctcccaaagtgttgggattacaggcatcagccactgcctccggccaggtatttgtatttttagtctctatgccttaccgtctcagatcaggaggatttggtgatttatcgaatgtgggggaaggggaagaagaggaaacgggaggaatgttccagattagggaaatagctagatggaagatgcagcccctcatcaaggtggggacacaggaaaaggaacgtgtgcaaagaagatggtgatctggttgtgaccatgttgttagaggacgtccagggaagcatctggtaggtggtggggtgtttaaatatagaacattcggagaatgctccgaagcttcagagaacccttcccaaaaggacaaaaccagctcagtgttttagcactccgggatcatatggcatgacagcatggctgctttatacttttttgtgtatgtgaaattaaaaccaaccactcaggaccaatttctctgaagctttttgtcaatctttcatttgcttttctcgtctagattgtaagctccttgcagccagtgtctgttgattcagtcattcaaaaaataatacatgaacagctactaggtaccaggctctgtgctgggcagttgggatatgtggtgaggaagacaaacttggtccctgcccttaggaagttcagtagtccagcagacaaagtggctgaataaagataatctcagttcacagtgataagagctcttacaggcctaggctccaggtgctgtggggatgctcaggaaaaggtatctaattgggattgggagcaggcaaaacaaataaaggatagtgtataaaggtaatatctagttgaagttctgaagggcaaggaggagtgagcctgtatattctctgagtctctccctaatctgggattgacttcttgtccgtctctgttcatattaagtgtcacctaggcttgaaagggtgagatcatatttcacttccttcctctttggtcttaacctttctctgctaccccctcacacaatgcatatgcattattctcttattgtatatatttttcctctcttccttttcatgtttcctctgccattacttttaacctcgactgccatatggcctctaaacgcttccagaagggtagcctagtggaggttattccatcatggccttgagctcatgcgaccagatagtgaaggcatctgtgtaggtgtcttctccaggagggtgatatttgtttcattgtaaattttgtagccctagaacaccaacaacagtgcacagtaattagtaggcaggcagtacaggattcattgaagtgaagtgataacttttatccaagtatgtatgcagataatctttgatttgtacaaaaaaaattatattttaatatgtaaagattttttaaaagaatcttcaagttttagccttcccactaggaatatattgaaaacatgtgcctagttcactgacttgcagctgccactatgagaataaaggtctcatttagttgttgtgaattttaagggatattttcaatgatgttggctggtttatcccattatgtggtctttttttttttttttttttttttttgaggtggagtctcgctctgtcacccaggctggagtgcagtggcgcaatctcgactcactgcaacctccgcctcccgggttcaagcgattctgctgtctcagcctcctaagtagctgggattacaggcgcctgccactacgcccagctaatttttggtatttttggtagagaagggtttcaccatgttggtcaggctggtctcgaactcctgacctcatgatccactcacttcagcctcccaaagtgctgggattacaggcgtgagccaccatgcccagcctatgtgctcttattagcaattctcagtacacagatagctttgagtgattctttcaagtcaagtaccttattaaaaaactcaagtgtactgataattatcttacttttaaatggctaagtgataagactgaatttttaggtactgtaacacttcagattacagattctgatatttttatggttatttatatttatttatttttgagatggagttttgctcttgctgcctaggctggagtgcaatggcacgatctcggctcactgcaacctccgcctcccaggttcaagcgattctcctgcctcagcctcctgagtagctgggattacagtcacccgccactacagccggctaatttttgttatttttaatagagacaatgtttcaccatgttggccagggtggtctcgcacttctgacctctggcgatccgcccgcctcggcctcccaaagtgctgggattacaggcgtgagccaccgcacctggcctggttacttaaatttaaatacaaaaattatgttgattaattctgaatgatttcctgattgctccccgtttaccattcacacatttattaaattcttcgcttgccatatagaagcagtctctctgccatatatgccatatagataacagaactagctgtctgcaaaccactgaaattgtgaaaacatctccccttttttcctgtttctaattctagctatgaggattatatacagaagtagtcctggatttgatttttttttttttttgatgattgttttttgatagttgttgactacaaatcatttaaacgtctgaaaggggaaaggttttccttaaaaatggatgacaaaggagaataaaaaggtattttgactatttttttgaatgatgagttttttttttctctttcttgttttcttttggagtcatttatgtgtcactgagtggataccatggaacatgtggcagaagtagatatatggggtaaaagaaccatagttcataagctccttgacagaatcactgaagtgtagccgttatatggccactgtcgcagggggaggcagcagttttgaagaaggggatgagtaataatgagtgataaaaaggcatcctggatagaagaccaaactctgcagaagaccccagtttgattatgcttttgttttctgatttgcggaggagagtgaaaatgcctgaggggtgcgggggagcacatagggtgtatgtgtgtgtgtgtgcgcgtgcagattctctctttcactgtatgtatttgtatgcatgtatgtatcttaggacttaagctttctagtcaataaattgccatagtggggaattgcttaattgcttgccttctgttgttgtatttaatttaattttatttttaatgatttttttggtggggtacagggtcttaactatgttgtccaggctggtcttgaactcctaaactcaagtgatcctcccgcctcgggctcccaaaatgctgggattacaggtgtgagccaccatgcccagcttagttgtattttaaatgggcctgtttgcagcattccctactccccttagtttacctggctcacaacctgtctttccatatcaaggcttctgtcacccctggcccatgtcagtgcatttgggcagcccacccagcatcatcacctcatgtcccagggaacttcctgttcctctcttccagctatttccttccctggcagttgagatagtctctacctttgacctactgttaagctcagaccttctgctctctagttacagcctctgtgctgccagattccctcgctcagttgctttctctagtttgggttttctcctttattcagatttccagctgtttctctcctccccccaccgcagcctcctcacttccctccttatgcatctgagactgtggtcagtcactttagatgctgcctctccactgtacttgtgtccatcttcttacctaccacctctagccctggagcaggctcttcccctgtctttgtcttcctgggcccaggctcctaagcgctgctggaaaaaaaatcccccagtattgagcccctagaaatccagtctttaatcccaaatctgtctcccccagcatctggccatcagatctaaagcttacctgccatcctttccacctcatttctctcacaggggaaaaggagcctttgctcctagagtctgcgctcctgaccccttcccatctcacctgttcaaggcatcttgcaataaggggttggtgactctcgaggaatggatcccaggccctccctattatcatcttatgtatgccagttcaacgttctcagcttcctccagccgagacggcccctccagccactgctttatactctccttctctggttgaaatttttgaagtaaataggtcactctgcccatcgttcatcttccagtcactctgtgtgtttatcttccagggaagtgaggctctatgctaccaagccactgaaataatttttttttttttccagactgagtcttgctctgtcacccaggctggagtgcagtgccgcagtcttggctcactgcaacctctgcctcccggcttcaggcgattctcctgccccagcctcctgagtagctgggattacaggtgcctgtcatcacgcctggctaattttttgtatttttggtagagatggggcttcaccatgttggccaggcttgttggcatgttgaccatgttggccaggctagcctcaagtgatccacccgtcagcctcccaaagtgctgagattacaggtgtgagccaccgcacctggcctgaaataattcttgacaagatctgcttccttgttactaatacagtggatattttgcatcctaattttaatgcagttcagtgtggtagacctgtatttgcatattgaatattcccttccctgttttaataactctattttttccttttcttttatatctcctgcttctctagctagtcctagaccttactcatcggtgtcttctctgtttgttcctcaacttgaggagttcctacagggtttacccaatctgctgctttcatttagcccttttgttctttttgagccatctcattcactcacccaggatgtagcatcggcccttgaattcagtgtgcacacatacactgtgcactatgggacagccttcagaggcactttgttcctgaaattgtggtggtctttgcctctcatggagccttgcatatgctgtttcctctgcctggaatatcctaccttttacttaactgattctcgttcttctttccagtcacattttgtacatttcttctgggaagctttctctgatttcccctttccacaggtccaagttaactgccttgtctaggtcctcccatggccctctgaaggcctcctttcatagcaccatgtctgagtatactgtaataacacgcattgctctgtaatagcctgtttacttacctattgccaagtaatctatcaagtcttataaagggcggggctgcttttgttctagtcatttgtatctcttagtacccaatatagtgtttggcatatagaaaatacccaacaaggccagtcgcagtggctcatacctgtaatccgagcactttggtaggctgaggtgggcggatcacttgaggtcaggagtttgagaccagcctggccaacatggtgaaaccctgtctctactaaaaatacaaaaattagccaggcgtggtggcgggtgcctgtagtcccagctacttgggaggctgaggcaggagaatcacttgaactggggaggtggaggttgcagtgagctgagatcactccactgcactccagcctgggtgacagagtgagactccatcttaaaaaaaaaaaagactccatcttaaaaaaaaaaaaaaagaaaaaagaaagaaaatacccaataagtagttcctgaatgaatagatgagaatgctgtttagaaggttcatgaattggaaaccgtgattgctagggaggctttgagttgatggtattgtgttgaaccatgtgttacccaggatcaatttagattttacactttgttttctctgttcctttttatagtaattttctgtatgtggtgttttccccccatgagattgtataccatttctcagcgagaactgtgtgtaatgcttggtggctccctcatggtgccttgcatggaattggacttcgtttcagtggatctgatcccagttatgttaatgctcgatggagctaagtcttatctcgaagcagtccatgtcttcatcagctggccctgcctccatgccctgcacagaccatgccactctggagaggtagtttccctgtggcttattagtcttatgttccagtgtgctggccaagtatgagagacatcagtggtatgagagagtctctctcattcaaacttcgtaggttttgtagctgggactgaccagtgctgacaggaaatagaggcatttattaaaagccagagatttttcaagttgcaggaagcaaagctcttgttagctatgattttgtggtgggtttggtagtccaatataaaagtaaaaactggatgacaatgggaggagcatgcttgggtctccaaagttagatcatttttcctaagtaatttgtctttaaacttttactggtttggaatttcctgagattttgatcttgccagaaagtttatagcaaaagttctgagcagatgacacttttgcgtctgaaaccaaatcattgtttttgtttttaacttttttcttaatatattatccttagttcagccctgaagattattctgttatttgtggatctcaactttccccccatctcctggatctttgtgaaatgaatggtattaattgaatagagaaggaagatataaacataaacttagtcaaaaacttgttcttgactaggcaagttgggctttatagctttgagctgatgacatgtctattcttgtgaaaaagggatttttagtgttggtttggcttcttgttatatttgatttattattattatcattatcattatttttgagacagagtcttgctctgtcgcccaggctggagtgcagtggctcaatctcggctcagtgcaacctccgcctcccaggttcaagcgattctcgtgcctcagcctctggagtagctgggattacaggcgggtgccactacacctggctaatatttgtatttttagtagagacaggtttcaccatgttggctaggctggtcttgaactcctgacctcaggtgatccacctgccttggcctcccaaagtgctgggattacaggccttagccactgtgcctggctgattttttttttttttttttttttaggtttgttttaactggaactttacgtgaatgtaattgaatttagaataaaagcacttaatttcacagtgtgcagtgaactttctgttacttattttaacagtaaaaccccttgcagtaaatgacttggagcaaagattgcttttttaaaaaatgttttaatttgtttttcttttcttgagatggagtcttgctctgtcaccaggctggagtatggtggcgcgatcttggctcactgcagcctccccgcctcctaggttcaagcgaatctcctgcctcagcctcctgagtagctgggactacaggcacatgccaccatgcccagctaatttttgtatttttagtagagacagggtttcaccatgttggtcaggatggtcttgatctcttgaccccgtgatccaccctcctcggcctcccaaagtgctgggattacaactgctgggattacaagtgctgggattacaagcgtgagccaccacgcctggccaattttttttttttttttctttttgagacagagtttcactctgtcacccaggctggagtgcagtgtcacagtcaaaactcactggcagccttaacctcctgggctcgaatgatcctcctgcctcagcctcccaagtaactgagactacaggcatgtaccactgtgcccagctaattgtttttttattttttattttttgtagggacagggtctcgctattttgcccaggctagtctacaactcttgggctcaagcagtcctcctgccttgacctcccaaaatgttgggattacagggacaagccactgcacctggccaaggattgttttttaagtgaactgagacccagccttattagtggtcccagagcagacctgggacctgaagggaacccttttcttctggtccagcgtctttcctctgatgggctactttcctggagcctttgattgcctgtcatcagagtaactgagtttgaacagagtaggtagttcctctccagaccaccacactcaccagctttcattctgcttctctcgtttagactgtggttctgaatcctcagttctatttactgagtgtttttaaacataaaaatgccttttaatgagattgaaggccagaggtgggacagttgaggacaaagtagaaataaaaccttcaaggcggggttgttggtgggagtctttttttgtttgtttgttttttgagactgagtctcgctctgtcacccaggctggagtgcagtggcacaatctcagctcactgcaacctccgcctcccgagttcaagctattctcctgcctcagcctccttagtagctgggatttcaggctcccgccaccatgcccagctaatttttgtatttttggtagaaacggggtttcaccatgttggccaggctggtctcaaactcctgacctcaggtgatctgtctgcctcagcctcccaaagtgctgggattacaggcgtgagccactgtgcctggcagggagtcttatagaagctgtcgtggacaatgtgggaagtagtgagcctttgtattccagtatgctgggctccactgtgcttgctctggcccccggtcgctctctgtgtgttattgagtccccatccacggccatactcttcgtcctgcttctctccttaccatcctctccccgctagtggtaccacggctaccactagcaattactgacatgtgggatcttagggctacttccctataaggctgcagggcatgtggtgttggctacgcgcatggtaaccatggtagccctgtggttctccacatgtgcgccttgtgacctgggattggctgcagactagtaataaactgcgtcttctggtatggaatctgtctgtagttgtactttctacctctgtatttaaggggagatctgtaacctaccaatgccagttgaagaggatggatgatagagatgttaacaaacagctgaaaaactaactacaatggcctgcaaaatagaacagcaggtttttgtggcaaaactttgtgtccatgagtttgttttttaaatatcctcatataatctgttttaaatcgagaggctttgggtaaaagccatggctagtcttacatgtcatggagtacctagcttgtgaggttcacagtttattatttacagagtgtccccttaaatcttctttgggtcggttcagcgaatgttgctcagatggacttttttggctgacatagagtcaaaatggtaatcaagcatgaaagtacagacagtccttaacgcacaaatgtgtcatgcttgaaaagttggaaagttggttctctggagctctgattgtattgtcctgtagaatccgtgttgtgaatggtggttaaatcccaaatgagtccgtagaacctatataatctgcaatatacctgcagtattccaattaatatgtaattcccccatagaactatgttaatgatttgtatgtatggtatttaatattatacataataatgattgtatgaataaaaaacattctgggctccatgtggatgatggggtgtgtgtgtgtgtctgtctatgtgtgggtgggtgtgtgttcatagatcccttttcctgcaatcctggcactggaattggttttatcatttccaattaagtttcattcccatgaattttggagtacagactgggtccaggtatgcagggcatagattagagccctgagaaataggattaggctggaattgctgggttggagatcagtagcttccaggaacactttttgggcctggctgtcttcattatccccttttgttttctcctggggtctgcaggtattgccctgttttgttcctctaatatcactttttttttttttctgcttttgaccagggtttttgcctctggtctacaactgaatatcctatcagactctcctgattttgaaataaatatatagtttttttgaggtgttctagcgaatttctaaatctaaatgttgtggcagagttattacatactaattttgctatgagaggttgtagaatcccagatgactaatcttgtaaaccatacacgcatttccatctaattctccattgtatatcatgttgcagaaaataacagcctctagagtttacattgcctcctttgactatatttcttatttaagattagttttcagataagaccttttcatggcagtacataactgtacagagggcttccaacttgtcttgggagctctcatctctgggagacatcacattacccactgccccctgccccccgcccccagcctggatgcactcagcctgtaccccatttctgtcctcagccaaacactgctgaaatgcaagagctttcaattgctagccagtgaagatgcagactaagggatttccatgtagaagcccgctcttttcagctggctcgtcgagagctggaggccccttgcttgttcacatgaggctttttgtccctgacttggtggctgctgtttcacttctcagcagaaagggacacccttgcccccccccagaaaggaagatttgatgtaccacttccgaaaggttcagtcgggcatcactgtaaccaagaagataggtcaggtgaggctggaggtggaacagggctgctcgctagaactccagattgttccacaagtgccttctggcagagaatgatggaagcttccgtgatttttttttctccttaatagttatgagcacagaagaggagcagattgtctggctatagaagctgtcttattttttatttttgtttttgagatggagtctttctctcttgcccaggctaaagtgcaatggcgcgatctcggctcactgcaacctccgcctcccgagttcaagcgattctcctgcctcagcctcctgagtagctgggaattacaggcatgcgccaccatgccagactgatttttgtattagagacagggtttcaccatgttggtcagtctggtttcgaactcctgacctcaagatctgcccacctcagcctcccaaagtgttgggattacaggtgttagccactgcacccggccgaagctgtcatattaaatagcactttctgcttttagcaaatttaatccaaatgagactttagattttcttgctctgacttaccagcagttccttgaaacacatttaattatttttgccagaaaatcactcaagcacttacgccatttttttaccgtgaaaatatgctgcattattttaaaatatattagaagtcagtaaccataagattttatatgttttctaatgtattctgtaagctttctgctgcttttgtttggaaggtgtattttgtaacgtagaggactgctttatctgcttgtaagcttgatttttgtttttactgtaatttttttttcttttgctgtattgagaaatacattgagtaattataaagtcagtggcatgtttataagttaatatttgtatctattccttagttactctaactcaaaacctaaagtaatcttcaactctaatttactctgacatccagttgactgccaagtcctccaacttaatccttatccttttttttttaaagagatgcagtcttgctttgtcacccaggctggagtgcagtggtgcaatcatagcttactgtaacctcaaattcctgggctcaaatgatcctcccacgtcagcctctggagtagctggggctacaggctcttgctaccatgcccagctaactttttatttttattttttatagagacagagtctcactgttgctcaggctggccttgaactcctgccttcaggcggaactcctgccttcaggcggtcctcctgcattggcctcccaaagtgctggaattacaggcccaattttattcttgggatgtatgtctgaaactctttccttcacttccttcccaagccttagttcaggcccttctcatctgtggtcttcaaagtcgccttcagctggttcaggtccttcctttctgctgtatctttcatgggaggacatgttatgtatcactgtcctacttgaaaacttccattccccattgatgagggtgttacctccagattcctaacacaggtgctgaaggcatgcctggataaaggcactcccttgatctcctggccaggtccccgtacacctgcagcgcatgctccacattctgtctttactgatgctgtgtcttctgcctgcggagccacccaccattctattcacagcccctgcctcagcggagcacgtgcctccctcttcctacactgagctgtcctttctattgaatcccctcttttttgtagtatgggaaatattttattatgaatactcttttctctgttgcctccgtgaccacgttaactttgccctaattcgccttaggactccatctgcttaggggaaagttaggatttggttacagaaagcaagctgctagaaagaacagtgtttagcttctgacaggcaaaataggattttgcaacatgcttttcctttttaatgcttagacattttatatgaattaatatttttatttggttgcttatacattactttctttttagctagaatgtgaaccctataggaacatggggattgcctttcacatctttgtatcctcagtacctaatgttcagtcaccctgtggtcttgtgtcgtatatacatttagccttccttaattaaaccatatgtactggtccccgtcccccacccccaaatagagagaaagaaattccttgaatactacattgccagtatcaaaccacaccttgatatcctctggggaaagggaggtatcagttgaaaagagaaaagaggttaaaatctaggcattaaaatgtgtaaggcttagatgctggcaatttaaggtatgttttcctgaggttaattttgattgtgtgcaaattttacctcatatctaactgtaggatttagtcaccacataagatgggatacctccataaatccttcagaaatgtttgtgaaattaaataaagccttattgaagactcagctcttgagagtcatctacctacctaacagttattcttgaacagaagagtcttacttttccctataaggcagtgtgatagccatctgtatattcatataatttatgttggcgcttacttcatttaaaaatgtattccgtgaatgcagttgccaggcggtgtgctgatcagaaacgtgtaccaatggcctcttttataattataagaggaagaccaacctgaaacagtcacacaaatgattaattttaattgtggaggagtgctgggaaagaaaaataaaagatgcaatgcaagtgtttacaaaggagctttgagcttgtttgaagtggtccttgggcacttaagcaaggcttaaagaatgatgtgattagaagtggcttagcaattctaaagaacacagggaaggcgtgtggccagaacattggtccctagagcacatcgcctcctgacataccatttccttaagttaatgttttaccactatacataggccctcccctttgtttacccagatttttttaattttaaggatgtttttaataacttagaatcctgtaatttgttgaacagtcctgtattccctttacttatattccttgagattttataaaatattttttacatgtcccaagtcttgattatatctttttacctcttgttaagaaatacttacttttctatttttatgctatatttcatgtttactgtagaaaacaaaaaaagtaaaatttttctttattcctatcactgcagcttataagcactctaaacattttgatctatattttgccaatcatatattttagttaaaattgttgttgacataattgtagattcctgtgcagttgaaagaaataatacagagctgagcgcggtggctcacgcctgtaatcccagcactttgggaggccgaggcaggcagatcatgaggtcaggagtttgagaccagactggccaacatggcgaaaccctgtctctactaaaaatacaaaaattagctgggtgtggtggcgggcacctgtaatcccagctagttgggaggctgaggcaggagaatcgtttgaactccggaggcagaggttgcagtgagccgagatggtaccattccactccagcctgggcaacaagagcaagactgcatctcaaaaataataataataataataaataaactttaaaaataaaacagagagatcccatgtgcgctttgcctagttcccccatccactgcccataacattttgcagaactgcagtacagtatcacaaccacaatactgacattgatacagtctgctcatcttattcatatttccccagtgttactcgtatccacgtgtgtatgcattgtgttttcaatactcttttattataaagctgtttttaatgtgattcaattctaggttgttttgttctgccctcaaaaagcattccctctcctaatcatatctccgtcatacccttgtatgttttctttaaacctgttttaagaaagcagctacctgtaagagaaatgagattgaaaacagaattgccaatctgcttgtactttataagcctgttgattgtttagatacggtttagccagtttatagttaccctgggtgctgaaaggtatgctggatgatacctaaccaacagagaaccattgaatgccgttcaaaatggactgaagcatcagcaatgtctgaaaaaggcctgacagtaatgtacatgtcaaatggcccgtaatttaagcagagtagagtaagtagaagaataaacatggggaaagttccagcaacagaggaggctttgagcttttgctcttcatcttgagtggatgttgttctcaggtggtaataggccatcgagctttctccactggctgcctctctggggaacaaataaccgaaaagatactcagcaccctggttggtacataggtggtcagttgatttatacttcctggttttcagtgttgcttgaattttctaaatggaaacacagtacctttataatcagaaaacaatcccgagttttgatttgagggtgttgtaaaaagttaaaaaaaaaaaaacagaaatgtgaaaaggaagttgtgttagagtatttggagttgagaaagcatgaaaaggacagaagagaagctggttgtcaggttgcatggggtagctacaagcacactgaccagaaagtcagctggaaaaaaaatgtagaaacaggagataaaacggccaaggggctatacaagcaaacagcaaggacctgagaagaaaaactagttaggtgtgactgtcagagtgatgtgtacagtgtgatcctttctgtgtaaaaacaagcagtaagaattcgctgtttacgtttgcgtgtgtttggagaagagtggggaagagtaggcactgccagactgtgaacactggttaggttattgttatatctttgtattatatacactggacatgttatttgtataatatgagaagaaattttataaatcattaaatcttttggcatttaggaacatttgtgttttctaatagttgcttctatactattatctttattatatgcccttcatcttctcagtgtttggctgttgttgtgattcccttttgtgagcagtgttgaagttagctaatattcatttcttctcccttctttcaccctcctccagagtctgatttgaagtattcctagctgctacctataaaagcaataagcaagattgttttacttttcacaaactcgtcctgttctgtgcctctgcctcggacatagctgtagtatagagtgttgtctcccttacatccttctatcttagacctactagtaaatattaatgctcactctaagttcttctcaattcttttttttttttttttttttttttttgagaaagagtttcgctcttgttgcccaggctggagtgcaacggcacgatttcggctcaccgcaacctccaccttctgggtttaagcgactctcctgcctcagcctcctgagtagctgggattacagtcacgtgccaccacccctggcaaattttgtatttttagtagagacaaggtttcttccatgttggccaggctggtctcaaactcccgacctcaggtgatccacctgcctcagccttccaaagtgctgggattccaggcgtgagccaccgcgcccagcctcttctctcaattcttcctgaagctctttctgcactagattcctcaggaagggcttgtgggaacaatcttctgtgaatcaacagtacatattcataatagtttgtcagcagcctattattttaaggccatttggtctgtatataaaaatgtttggatcacattttctttctttaaggtaaatatgttattctgttgtcttctggtataaagcattgctgtaaatgtttgacagtctaattatcttttgcttataagtgacttagggttttttgtctatgtgcccaaaggattttttccctctttctctctttttttttttttttttttttttttaaacagacaggatctcaccctgttgcccaggctttagtgcagtgaggcagtcagagcttactgaagttttgaactcctgggcttgaggaacaaaggatttttttaaccttttaattcaaagtctcatcatttatgcaaccatgtcttggtgttggctgttttgggttgttctccctcaaaaatccatgtgctctttcaatatgtagttttaaatcttttttttttaatttcaggaaaatcttgaattagagttttccgtttttcgtctggtacattgcttgggtttccttcttcaggaactcagcctgttatgtgtatgtttgatcttctttgcctgtcgtctgtttctttcacttcctctcacttttttaaacttcatttattaaaaaaaaatttttttttcgagacagagtttcgctcttgttgcccaggctggagtgcaatggcgtgatctcggctcactgcaacctccgcctcccaggttcaagtgattctcctgcctcagtctcccaagtagctgggattacaggcatgcgccaccacgcccagctaattttttgtatttttagtagagacagggtttctccatgttggtcaggctggtcttgaactcctgacctcgtgatctgcccgcctcagcctcccaaagtgctgggattacaggcgtgagccactgtgcccagccttattaaaaattttaaaaacatacatttaaacttaacagaaaaattatgagagagaagggggtggtgccaggcttttttaaacaaccagctcttacatgaactcatagagtgataactcattaccatgaggacggcatcaagccgttcatgaaggatctggccccgtgacccagacacctcctactaggtccatttttaacattggggatcacatttcaacgtgagatttggagggggcaaaactacaaaccatgtcactcagggattggaggagcaagtaccacctatactttggactcaggtagaaaggcaaaatatccaggaaataagctgctaccgtccagggttcagcagaggtgcccatcagcctgccaagtactcaagagtccagcctctagggagctaatcatcatggtgagctcttcgaggcacagggagctgggaagacagtgcttgccacccctgcctgaatagtgtttgcacagagagttctgttgtgtcttgattgggtcctcctgccactgggaatgctgtggattatactaggtctctatctggcttgtttcagggctccatgtgaaaaccttcttgatatcctagccatccacctgctcagtccctagtttgcaaggaggctgtggggagcctagattctgtgtcagatagaatgtactacattccgtctcaggaatgtaccacatcagaaaacagtgcgacctgcaggagaagtagaggtgaagaggcacattcttccgagaaatgtttctctcaacacccagcattccctggatatcagcaggaaattactcactgctagaaaatgccccatgagccttctgttaaggaggtcaagggagagaacagagaaagttctcaaagttgacttggtcactggtactttcttatgcggttcttattttgtttgccatcgtcatcatcatgctatgtctattttctcaatccaaatccactgctttcaccttggttctttctgaccggtttggcacactcattcagtaaatccttatggagagcccaatgtctgcataattgtgctgtgctgatgaccaagctagacctacgagtgtcggctcctttgagatgtacgggacagctcttctgtcatctcttctgggaagcctctccaggcttggtgaacagtggcaagatgtttaacagttgtacatgtgtcccatgttcctttctaagagcctgggcaaaccagacccggtcgcaggtcatcgtagtatggcgtgagcttcctctctcctttctgaccttttgtgtgatggcaagaacctgcagagtgacacaagcagcaggcttctgaggttgctctagcctcagaatggccgtcccttctccaccctggccctcattgctgaggtttcctttgaagcaacagtgccggaacagactaggggaagcagcttggacatagctgtatgatttattaccacccattgaggccaaccaaagtcggcaaggagaggtagcaggtcagtggtgcctggaagcttcctctttcctttgcaccagatgtgactgctctgcaattactcctaaatttgctactctcgtttttactagccaaccttgatgtttttcccttcttcctgtagaatagacttcccctctgatcagtactttctactcaacactatttgtggccacagtgggaactcattgaggacagggaccatgacattactacctgacccatcaacacttggcataacttgaaatgcaaggacaaaaattggctgcaagtacaatgtggtcttcactctgaaggtgatccttaaaacttggctttggcatcatattgccttaatatacctaggggattgggtaaaaccagttactttaaaagagttttacaattctggccttctagctatcttgtcttcttaaacaagagcacaagatgaatgtatcttagtgaaattttatatggtttgctttgagtaatcttgcgaagattgatttttagcacagtaggaaagacacattctaatagtgatttttttccccgagtttatgtactgctgttgcatgaaaatctgactagatttaatgttcctaaagttctttgttcatcctgatttttgcaggtcctagggaaagctttgttttcctcttaacctaacttagatgttgtcatttcatgagctttggaggaagagtgtatagccaattgtgtaatgtctttaaaggatattatctctgcaatagttgtttataaggcctaagttattcatgtaataatagtggccccggatctgtttctagcaataggtatatggattttggttcctatatagttgtagttgtggctttgagatattgagcaagcccttttaagaaaggatttggcatccctcagccttcaaaagcttctcaaaattgatcatatgttattagcaaaggtttactgcctgcttccattgtatagacaatttattttttatgtattccgttctaagaaggcagatgaccaaaagatcttgcatctgttgcccaaggcttgtgactagagaggaaagagataagaatacttttttaaaatcccattttactaaatatgttgaggaagtggtaagatatattaatttgttgagatttttctgttatgcctattatatgaaataggtactctgaacatggcttcttaattaaatatatttgataaaatacaacttgcttcccctggagtttagaagtcagataactgccatggagagctatgctttctttgttttaaagatctgcttatgaacatgataaacaggaacaatttaatgttttcaatattttcttgtattttactgcaagtttatacacaacataaatatgggggaagggggaaatgtttataccagagccatcctgcccattctttccttacagaaggacaaaggagcagtatttattttaactacaaaaatactattgtaggttttaaaaattccgtatattttgatatcttgtgttcctcttgacctttaatttgctaaatagttgcaaagaatgaaggtaacctgcatcatcttcttaaaaaccaactctatctaattataatagtttgtctatctctgaaaaatagtgatgtgttcattctgaaatcagaactaccggatgcagctgcattttgttactatttgaatttcgggagagggaggaggatgcagcctttcgagctgctgaaatacacaaacacaaagaagacaccaagcatagtagaactgtgttaagctgaccaagccagaagaagcacctattctcagcatagtatgagacgtaaaggcaatataatgggcatagttgaagatggtagaaggaaaatagactctgatggtttaatgttaaatgctttttttaaaaaagtggtattccaatatcgaagaagaagactttctacttttagaagcaataaaggaaattgcagaggaaagggtcaataggttggaatacataaaaattaaaaacttttaaactttttttttttgagacagagtctcactctgtcacccaggctggagtgcaatggtgcaatctcggctcgctacaacctccgcttcctgagttcaagcaattctcctgcctcagcctcccgagtagctgggattacaggcatgggccaccactcctggctaatatttgtatttttagtagagacagggtttcaccatgttgtccaggctgatctcaaactcctgacctcgtgatccgcctgcctcggcctcccaaagtgctgggattacaggcatgagccaccgcgcctggactaaattgtttcagtattaattttttttaaaacaagatcttactgttgcccaggctgaagtacagtggcccaatcatggctaactgcagccttgacttctgggcctcaagggatcctcccacctcagcgtcccgagtagctgggaccacagacatgtaccaccacacccagctacttgttttatttttatttttgtagagatgaggtttcaccatgttgcccaggctggtctcgaactcctgggcccaagcaatcctcctcccttggcctcccaaagtgctggtattacaggtgtaagccattgcgccctgcctgattttttaaatgtgcaaacagataagttggaaaagtgatttccaataaagataaagagttgatggttttaaaatacgtaaagagcttatatgaatgagaaaaacactaacattccaaaagattagaaggcaaaggacagaaagaaacaaatcactatgtctgggaagggacatgaaggagcaggttcccactgggccagcggggctcaaacccactggggacgtccgagagactgcaagggccatgccttcacattgccgtacctgagaagcaaggagctggggtatttatctctttcacactttgggaggctgaggtgggcggatcacctgaggtcaggagttcgagactagcctggccaacacagtgaaaccccgtctctactaaaactagaaataattagctgggtgtggtggcacacacctgtaatcccagctacttggaaggctgaggcatgagaattgcttgagcccaggaggtagaggctgcagtgagcataaattgcaccactgcactccagcctgggtgaaactctgtctcaaaaagtaataataatcatgataaataaaataacattagattgttagcagaagtagccacaggtttctcccacctctctgcaagttgctgagtgtgattcccatcaagaggtacaatgtctttttatttttattttatttattttatttatattgcctatgttgtctaggctggttccaaactcctgagctcaagtgatccttctacgtcagccccccaaagtgttgggattacaggcatcagccactgcacctggcccagatactttttcttgagtaggaatttcgagtcaccctgaacattgcatgccttcgtagtggggaagacaataggaaaccacaggctgtaggctaaaatgggttgtgtttcttgtaacgtcatgacaaggcataacccatcttggcatagtaaatagtaagcactcactgaactgatgattttaaatctttgctgtttattcagcaatatcctaaattagcgctatgttagtggagttgcatctccctcatggattagtctgaaaaagatgagaaatctgtatgtagaccaagttatccttaaactgctcataatgtatgatgcacgtggttttacgtgtacagcctggtaccattgttcttaggcacatttcagtgccagaactcttaatacccaggaagaagcaaaaagaaagatggaggtgcagctagaggttgtggcctttgaacgattcattctgccttaataagagtggtctggctgagctcggtggctcacacctgtaatcccagcactttgggaggccaaggcaggcagatcgcttgagcccaggagttcaagaccagcccaggcagcatagcgagaccccccctccccccgtctctacaaaaaaatagaaacaatgagccaggcatggtggaacgtagtgcgtggtgcctgtagtctcagctacccagttggctgaggtgggaggatcacctgagccctagaagtcgaggcttcagtgagcccttattgtgccactgcactccactctaggtgacagagcgagacaggtcctgtctcgaaaagaaagaagaagaattaaaaaaagtgattagatcccttgtgtttgggacacttgttggcagcagggatggtagcgtttatgagggttgcatgtaacatcgcctagctcagacatctgtttgactgtcttcccccctgaagcgcaggctctgtgagggcaggtcttttgtctttcttgttaatcttcatatgcttagtgcttgccacatagttgatgctcagtcgatatttggatgaattgaagggattaatgcattgaatctgaaccttgctttcttaatgcatatggggagttctttggaaagccacacagaggagcttggttgcctgcttcctctcttccccagattgtctttttattgttgtggcttcactgaagcactctcacttcaaataattttgggcattggtcgtattttattctttgttccttcttcatccttacccctcagatggtatgtagaaaagtacactacatctagaaagtactttataaactcatttggttgataataatacatatgccttttccttggtcctggtagcagaatcttgtgccactcttggaatacaaacgaaattcttaaccaaagccagtttcattttgatgttctattttcctcccattcacactccaaattgtgcaccaaagtatcatcctagttttgtgaggatggttctccatacttcagggtaggagtatcatgtggattcctatgatacctttctccctgggaccatggagggcagcagctggtgattgatagtctgattcccggtgaggaaagctgtgagccttccacttgcagatgtctgccaactacatgtgtccttagtcaactgtaccactgtcctccggcaaacagcagaagcccagggcctgaagttcttaagctgtcattatggaaagcagaaggtaaacaaaacagaagtgaaagtagatttaattttttagactgttctcttacaggaatggttttgtggttctcagcattttaaaaaaaatagtggttccaatatgttttattgacatcaattactgtaagtctgattcattttctgcctattgatttctacccaaggtgaaattcatgacatttaacagaaagcataagtgattttttaaaagcagacactattagggacggtaaaaataagatttaaagtcgggacacttgaaaaagcaatttttatacctttggtaacgattctattctgattctttgtataaataatataaacaaaggctctagaagcttactataatgaagttggtgtgctgtttctaaattctggtttaaggcccaaattcattttatctgcattaacttttttttttttgagagtctcgctctgtcacccaggctagagtgcaatggtatgatctcggctcactgcaacctctgcctcccgggttcaagcgattctcctgcctcagcctcccgagtagctgggattataggtgtgcgccaccacgcccggctaatttttgtatttttagtagagacggggtttcactatgctggtcaggctggtctcaaactcctgaccttgtgatccgcctgcctcggcctcccaaagtgctgggattacaggcgtgagccactgcacccggccgtgttaaaatttttcagtggtagaccactatgtcaatatgttgctttcactgacaacagtattttcttaaagataggataccccatttctagatgaatctcattctagctggaaaataatttttcagttctgaaactacatcaggcctcagggaatcaaaactagctattagccacacacatataaagtggctttgctttataaacgatttagggtcaccatcaatgacaatggtccctttttattgtatttttaagagtttcttatcttaaatggctgcataactgtagagttttaaaaaaattaagtaaatgaccatgttaatgctctattaagcttccaaacaatattgtaatttactttgaagatttttttttattctcaacatcctgcagcttgaccgtttgcctccgtgtctcagtgctgcttattttgaggtgtggactggagtccatctgtcccccttgcctctgaactgctccgttttgtgtttcgtaattcttcatgctgcatcctgggcgcatttctctgtagtagctttcaatttgctcatgctttgactgggcttagtctagcgtttatcctatctcttaaggttttttaaaaaattttcatgattattcatttatttccaggatttctcatttcttcagtcacatctccttgttctggttttacttcttcctgtttttattcataacatcttttttatacacgattccttcatgtatttctaatcttaagtatatttaattgcttatttgattcttttttttttttattgagacagggtcttactctgccaccaggccggagtgcagtgacatagtcatagctcactgcagcctcaactacttggactcaagcgaccttcccacctcagcctcccaggtagctaggaatacaggtgtgagagccgccacacccagctgatttgtcttactatgttgcccaggctggtcttgaattcctgggctcatgtgatctgcccttcttggcctcctgaagtgctgagattataggtgtgaaccactgcacctggccaagtatgtttatttatttattctaatttgagagggagtctcgctctgtcgtgcccaggctgtagtgcagtggcacaatcccagctcactgcaacctctgcctcctgggttcatgcgattctcttgcctcagcctcctgagtacctggggttacagttgcgtgccaccacacctagctaatttttgtgtttttagtacaggcggggttttaccctgttggccaggctggtcttgaacttgtgacctgaagtgatccgcccgccttggcctcccaaagtgctgggattacaggcatgagccaccacgcttggcccaagtatgtttatttttaaagtccccaacaagctatacaataaattgcatatggaatggatttttgttctagttgatttgttggttatcatttgtagaactaactagttgtcttctgtgtttgataccttgcttctaggtcattttgagttgggagccttttgttttgtttttattctcatgctgtttttgagcctagctgtgcctttatggttttctctaaatttaattgaccattgttttatatttggagcagtgggtgtacatcagagtgtgaaagcagccccaccctctccaccagaaggtctccatgccagtttcacgaagcatttttcatgccctcattcctgcccttatcccttgatttgtggggagtttgtaaagcagttgattgttttttttccacgtagttttccaagtgcacataattgttctgttagtgacttgtagctccattatctattaaccttgccccagaccactgtacaagcggacccaacgcttcctccagctgtggcagggacagttacttggtatcctgctgccttttcaatgctgaccagttttgccccttcctcccctcaacccctgtctttcattcaactatcaccaaaccaaaagattctggtttgctttttagtatgtgttcttattcagtacatagtcattttaaaatttaaaccaaaacagacttggtactgattagcttaattttaagctttttctttattattaaacagtgtagtttatcttagcatttcatattaagtatatgatttatttcatattgcttatatgaatgtacacataaatataataaaaatattttcctaaggtttttgtagtaaattatatcgtttcattaactttcatatatagcattgcttttgacctggaagacattgaacctctgatgatttgtatattcctcggagtatactttgttacatagaaattttctcatttataatgagatttgtgattaacaaaatttgttcaacatgcattactttgaagatctggtttctaaaattttatgctagttaccccacccccccttctatatatatctccctattcagcgactactgcaagagttccaggaaatgtacactgtgtgttcacttactgcattttaaatcattgcctttactatatttctgcatttcccttcaatctagctctgtctgtacatttctgaaagccagtagcttccctgaagaaccaggtaacaacccgaacaatcaaattagataaccatttgtagaatggaggttccgggagatcttagaagatgtgatgggtgctaagggactttgtagttccctgaagttccagtgagtaaaaggtacccttggaattttttattccttcagacttttaaaacagagatcactttcaaaaattactctttctgctttgaatccatgttttagtaactattttgacactgtttggtcagaaggctgtgtgggtcaactgcaaataaataaaataaatgtgatttcagtaatttccattttgtaacaagtaattgagaaaataggattggatcagatatttgcttatacacattccctttcaggagcacttctgttctataaagaatgttggtatattgttaaggacacttcaagctttgggaacctttgaagtatccattgattcagttaacaaaattatgttgagtgcctaccctgggcctgggcctgtgttaggaggggacactaagatgagagtccaaagcacttcttctcagactcctggctgctaatgggttgctgcctctacttcttcacttagcagatagctttaaaatgagtaatgcattttaccatggagcccgtaagagacattcacccagttgtggaccgaggagaagggtgttaaacccagattgtgatgtttcacttgatgaagtgcttaatataaacatggaaatatttccgcaaggataaactggcttttatgcctgtgtgttttcaggagaaatagaaatctctaatcaaatattgccagcttttcacccaagtttgactttttgcctaattgagtttgggaggtgtctgaataatggataatgagctttcctgaataaatataaaaattaattaactccaggctctaattcattctgttaccagagttttgtaagcatgttacccctttgtgttcattgggagatcatctgttaccttcttaaatgagtggggaaggatgggaaatgaggaagagctataaaaactattcaggtgaagaaggtttctgcccctccttgccccttttaaaatctccagctcagcagatgctttgtttaaacttgatcaagtgcttgtgaatcttcctagcctagctaaatcataactttggaaggacttgcttttttctctcatgacaatggtttaccacagaaatgattcagatcactttgtgtgcctgatgcctatgtaaaatgatacagtgaaatggaaaccatttacctgtaagctttgggcacacccaagcctgcttcaggagcacatgatcaggcgtgcactctgggagagccgtacacatttgacatctatgatgtgtggcgttttattctatcacatttctgaaatctacactaagagaaaggaggctcttaaaaaaccactgaggtgtggactgggggaaggagagatccgtaaagaacctgtttgttacctgttgatactatttcccattggtaaaatttctaatttagtgtgatccagccctgaaatgctgaggcacacactgaatgactcctgacatctttagtgtttttgttcaggggactcttctgggaatctgtttcatggcaagtttattattcccttttggtttggctcatcagtttacccagcagtcatcttaatcggttttaaaggcttttattttattttgttttctctgtggaaattttacacattcagtagattagaagtagttatttaatctttggttagcataataaaagatcttctagggacattttttgcttgcagtggaaggctagttaaatgtgttcattagtcatgaatctgctttttctatagctgttggaaacgtagctcccctgtgatacagttgtagaatacagaaatctcgttttgctgttacggtacggtagtctacttactttcttccaaaccattaatgttatagttacctttaattgcgtaggtcctatcacccctcaattttaagactctaagcctggcattttatcttacaaaatgaaatataaagacttgtactcagagtatgtgtgtgttttccatataccattctaaagtagagaaagatgagggattcgccagaaactgatttctaataaattatccagaaactgaccccttctcacctcttctgttactgtcactgtggtttcagccacagcatcctttgctgcattgttaccttagtttcctgactgtatccttccttacaccattgatccctgcaatcccatctgcgcgtagcagccagaagggatccacttactgctgtgatcagaaatcctcagccaggtgcagtggctcatgcctgtaatctcagcactatgggaggctgagactggagaattatttgagcccaggagtttgagaccagcctcaaactgggtaatataatgagacctcatctctacaaacaggaaaaaaaaaattttttttttttttttaactagccaggtatagtgctaatatacctgttctgggatccagcatgctctccctgacctgcagcttcatctccaccactttgcccctcactcccaccacaatggctttcttctcttcctcagacatgccgtgcgtcctcctacctggaatattcccctccaaacattcccatggctcactccctcaccttcatcagatctctgttccagtgtcacttttactggaaggtcttttgtgaccatcctacttattataaaaaaataatctgcccaaccttctccttttatttcctctacttgatttttcaatttagtacttatcagctgacatatattttgtctctctgtctctctctgtctctcatagaaggtaaattctataaaggaaggaatttttatgtttggttctttgctgtagctccaatattcaaaacagtgcctgacacacagtaggccctttatatttgttgaataaatgttgacactctgatatctaatttttgtctggtgactaatacgaaaactatagagtgataataaaagcattaccttagtagactggaaagggatgagcgctaggatgaactttctgcctggcgatcttgctgaatttaggaggcagattggggttcaaaggaggctgaaatggctaggatttgcagagcagggtactaaggatgagcaggctatgacagaaagaactccagaaatctgcaaagggatcaccttgagtctggctggatacagtgtacactttgtagggtgtctcttcatgagcttggataaagaacaactgttggggagtggataattcccagcactcattcaagcttgcatcggccagaacggagagagacagacctctgtaatacgtaggatatttggtagaaacattcaaccgaaaaccatcagatatgcaaaaagtaataataataagtaaacaatgtgatgcatagctagaagaaaaatcagacattagaagcaagcccagaaatgacagatgataaattagcagataaggacattaaaacagctattataaataacttagcagatttaaagaaaaacaacataatgaggataatggaagaaaaacaaccgaataccatttctaaagaagaaaaatacaatatctgaaatgagaatttagctggataggattaatagtttaggcactgcagaagaaaaaaacagcatctatatgagaatatacccaagggaagtacagagaggaaaaaaatgtggattggggggtgcctcagtgacatatggaacaatattaaacaagtctgcccccaaaatacttgaaggaataaggttcaagttttttccaggtttaatgaaaactataagcctacagattcaagcatttcaacaaaccttcagcaaaataaacaaaaccacagtaggcctggcacactgtctcatgcctgcaatcccagcactttgggagcctgagtcaggaggattgcttgagatctgcttgggcaacatagccagaccctgtctctacaaaaaataaaatgaaataaattagctggatgtggaggtccacacctgtaactctagctagcctggaggctaagaagggaggattgcctgagcccagtagttcaaggctggagtgagctaggactgcatcactgcactccagcctaggcaacagcaagaccacatctctctctctctctctctctctctctcaaaaggcagtgaaataacgacttatttggggaaaaaataaaggcagagaatttgttgccagcagactagcataaaaaaaaggaagtccttgaaacagaagagaaatgataaaagatggaaatttggatatatactaaagaatgaggattgctaaaagtgacatacatagataaatatgaaatatatttttattttaaaatttatttaaagcaaaaataaaaatacatcatatttataacatagaaataaaaaatgtatgataatagcataaaggataagtggacaaatgctgttgtcgtatttttggtaaaatgcactattatttgaaagtagaccatcgtgaattcgatgcatattgtaaaccaaatagaacactaaaaaatgaaaataaagagatatggctaatgtgccaatggtggagataagatagatgcaaaaaaagaaaaacattcaaaagaaggcagagacagaggaaaaaaggaccaaagatcaaatgagtcaaatagaaagcagctaaactagcaatatggcagatttaaatctagccatgtcaatagttatattaaatgtaaatgttctaaatacctgaattaaaggatgaagattgtcagattagattgaaaaagcatgacccaactacatgctgtctgtaagaaattagaaaaagaacaaattaaatccaaagtaagaagaaaggaaatagagtagaagttagtgaagtataaaacaaagagcaaagaaaatcaattaaatgaaaagctggttctttgtaaagatcagtaaaattgataaatttctagctaaactggccaagaaaaaagaaaagacatacaaattaacagtatcaggaagaaaaacagagaattcaaaggagtgtaatgcaaactttatgctagtaaatgcaataagttagatggtatggaaaaaaatgtgaacaatacaaagcagactgtggttgcctttggtggcagtagcggggtgggagtggaaggttgaattgactggaaccagaagcacaagtgaactttttggggtgatggaaatgttttgtatcttggttgcattgatagttaaatggttgtagacattgcttaaaactcactgaacacttaagtgggtatgttttattatttgtaaaatatacctcaaaagcagttttaaaaatgtattcaagtacatacttaagatctttgcattttactctgagtataccttaattttaaaatctgttttttaaaaagtattatgtagataccttttattttcccaatgtctttattaaatgacatctccacgttttgcttcttacctctatttttttttttttatttctctgtctctcaggcatgcacacacacacaccaaaaaaagtacatatgcataatccttttggctgaataaaatcagttgcaactgttatttcggcccttatttgctccgggtaaatattcgttagctgagtggtttatctgtatcagatatttcttacatcttcatccagtcacaccagctggactgaccagattgtttttcacttcaagggcagaatttgtactcactgctgaatgcttccaaatgatacgtagaataacaaatttaagacttagatttttactttttcaggtctttttttttttttctgtgctgtatagcatttccctgaaagcttaatctcatctgtaagtgatgcagtggatgtgttactattggattaatttatttactcttaggtaggtttgtaatctgtcatcatgctgttgtttttttgtgtgggtttgtttttggttttgagacagggtctcactctgctgcccaggctggagaggctagagtgcagtgatgtgtttatgggtcactgcagattcaatctcctgggctcaagtgatcttcctgcctcaaccccttgtgtagatggaagcacaggtgcacgccaccacacccggctatttttttaaatgtattgtagagacgaggcatcatttttttgcccaaggctgatcttgaactcctgggctcaaacaatcctcccacctcggctcccaaagtgctgggattacagatgtgaaccaccactcgagctccatcattctgttattagttgttctctagtatgagtcaaaaactcttacctgcccttttacagttttataaataagtaagcagaatagcagaatgtggacattttttaaatccaaattgaatatgcacatgactcaaggagtcaaatagtaccgtaatcggtttatgataaaatccagtggtttggctgggtgtcgtggctcacacttgtaatcccagcaccttgggaggctgaggcaggtggatcacctgaagtcaggagtttgagaccagtctgacctacatggtgaaactactaaaatacaaaattagctgggcatggtggtgcatgcctgtaatcccagctacttgggaggctgaggcaggagaattgcttcaacccgggaggcagaggttgtggtgagccgatatcgcattatttcagaacaattttccacaagatcagtgagtgctgtccaatagacatataatacaacccacatacatgactttacattttcttgtagccatagtagaaaaggtcaaaagaagcagatgaaattaatagcctgggcaacaagagcaaaaccccatcttttaaaaaataaaataaaatatggtggtttgctgtccccacctcagaccatttctctggtctttctcattgaccaccactcccaatctttgttctgctgattgattacagcttgtatatatctccatatttctaagcaaaatgtttatcttttttaaatttataaattctttttattatttttcagagacagggtcttaactctgtcgcccaggctggagtacagtggcaccatcgtagctcactgtagcctcgaactcctgggctcaagcagtcttcctgcctccgcctctcaggtagctgagactacgctacaggcacataccaccatgcccagctcaaaatgtttatcttttgatacattattcgagaccattattaaggtggatgatttagttttcttaaacagccatcccctttcttttcctcccctctgcttcaccgcccccattttcccaatgttttaccttttggttaaatcagtactcattgtttacattatttgcctctgcacatagtcacagatagtattgtactgtactgtactgtgtttcttttttaaacattatttctgttgttaataattgactttttaatttttttcctattttgttttttaaagagatggggtcttactatattgcccaggctagagttcagtggctcttcgcgggcatgatcccactgctgatcagtacaggaatttccacctgctccatttccaacctggaccagttcaccccttcttaggcaacctggtggtcccccattcccgggaggtcagcatattgatgccaaacttagtgcggacacccgatcggcataacgcatgcagcccaggactcctgggctcaagcagtcctcccgggctcaagcagtcctcccacctaagcctcccgcgtagctgagactacagacacttgccaccacaccaggttaatttttgtgttttttgtagaggtggggttttgccatgttgtccagactcatctcaaacttctcagctcaagtgagcctcctgcctcagcttcccaagtagctgggattatagacgcatgccaccacaccccatgataattgcctttttttttaatttgcataattttctttgtagcttttgctaatgttcccatatcttcttatagccttacagaatgattttccacaagatcagtgagtgctgtccagtagacatataatacaacccacatacatgattttacctttttttgtagccatagtaaaaaaggtcaaaagaagcagatgaaattaatagtatcttttacttaacccagttcattcaaaatgttatttcaataaatggtcaatatttaaaatacttgagatattttgcttttatttatttcttttgttactaagtcttcaaaatccaatgtgtattttacacttacagaacatctctttttagactggccacatgtagctcagggttactgtattggacagagtggtttcagtttcaagtttttccttggagacatcctacttgaaatttccattctccatgtatctgggtggttggtctatagacttgccactcacagctgtcatcttgagactttctttgcttttcttctctattggatattcagtttcctggatttcaggtcttctcattttcctctagtagttttgttaggtcatggttggtatggcatggttgggatagcgtgttcacacagctatctcgtgagtcatactcctccaatccagcctgctcgcttcccgtgtctgtcatgtagttgtcaccctgctatctctccctccagtttttgcagaaatttcctttgtcttcactcttggtcttcctctcccatcccccatgtatcctatatctttctctttcttggtttatttcatcactcaggtggaaaagatgctccagtggattactgggaaaagggggagcatggatgataaaggtattgagaccttacacgtcagggaatttttttttttttttttttttgagacggagttttgctcttgtccaggttggagtgcagtggcgccaactcggctcactgcaacctccacctcctgggttcaagtgattctcctgcctcagcctcctgagtagctgggattacaggtgcccgccaccacgcccagctaattttttgtatttttaatagagacgaggtttcactgtgttggccaggctggtcttgaactcctacttcaggcaatccacccacctcggaatgtttttattgtcccttctcatttcatgactgctgggctaggtatagaattccagaatcattgttcttagaatctcgaaggcattgcttcattgctggccagctttcagtgttcttgcaaagtctgaagctgtgctaatcacctcatcctttgaaagtgaactgttttttcttcccagaaacttacagaacattctctttgtccgcagaattctgggattgcaattactgtgccttagaatgggtctgtttttatcattatgaagagtactggatgggtcgggaggttttcttgaattacttcttgatgttttctttccttgtatttttttgtttgctaattttctatttttttttcttggtttactttcttgggcagggggatttcttctacttatatttgattcttcagttgagcttgtcatttttgctatcttgtttttaagtttcgagagacatctttgttttatataacattctgttcttaatacatagatgcaagatcttttctttctgagtatattaatatgtatttgaaatctttctattctctgcagtttgtttcccccaagggtttttttttttttctggtttttgttttttgtttttatgttagagactttcctgttatatctggtcatcagtggtacctgcatgtggtggagagtaggggcttattggagtatgagaaccttgagcaggtgtaaggagcctgtcaacactgcgctggcctcagggcctctagggaggctgccagttgtgcattctgaggataccttttggttgtgccttttgtctggtcagattatctagagatgctctgcctcctacctggaggagaagggtctagctgccagcggtgtgagtgtctcttggggaaaaggactcgagttcctggtgtttggcttgtgtatggccgcttaccccatttttggtggagcgctcacatcttccactgtgccaacagtcttgctgcagttcatagaccttctggtttacatttttccagaaagtatgtctttagatttctgcagaagtctgaggagcatggaaggagcttggggaatgagatggcaatccaggtcttcccagatggctctacctttatcccctgcagggaatcccactcctccttcctgactgggagcacagccagagccttgggaggaatctggagtggaaatctcgggcggtctggctttcttactgttcacttgtaattttgctttctcacaactgccaaccactaatcagcctgatttccagcttccagaattctattgctgttgtctgctctcctattcccaccgtaggggatggggctgtctttttttttttttttaattttggtaaaacatacaaaacataaagtgttccattttagccatttttaggtacacagttcagtggcagtaagtacattcacgttgtgtgtatttgtttttttagtaataaacaatataaaattttttaagtaataaaacacaaataaaagattgtttaatgtgattatcgtggaattttaggtgtgatcaggagccatggtgtagtcttctgttgaaacagggtgataggatttgtttaccacctcctaggaaagcagttggatagtttgttggcataaaagtacattttatctatttttaataatcgtagctttatagaaattgcagttggaactcccaggcctggcattcaaggctctctgagatctgggctacccacccatgtcctccagccgtctgtcgcacctcctactgcccactcactgttcctggcatgagatgtgatctccagcccccatgcctttgctgtgcagggtgttccagagtgaattgtccctcctgtctgtctctctgccctcttcctcgtctttccatcttcctgccccacatcactgcctcctacccaaggcctgtgctcattcctcctcggttttcccccatggcctggtacatacctctgaattatcaccttgcatttcccatattgcccggctctctttgatgtctgtttctttgctgggtcttcctcagtgtctgacggtcagttaaatgtctttattcttttttgtaggatatccgacatgaagccagtgacttcccatgtagagtggccaagcttcctaagaacaaaaaccgaaataggtacagagacgtcagtccctgtaagtatccacgtggccggtaccagtcttgctcttcctttgctgcaggcctttttagtcaagactcctttcgcctcagggtttagtataataataaatcaatgtagcagaggtttatgacgcgattgtttcctatagtaaaggcattagagacttatagtaatagctcatttttccaccattatagaagggctcaggtttcagtttctggaaaattcagtgaagttcaaagcacttttcttaagctttgactgtttttgtgatgaatcattttcctaccagctgaagcagagtatagcaggcataataaaaccttttctggatgactcagcagcagcgtcattagggcatgagcactgtgttccgctgtaatgaagccccgcacaggcattcggggtgggcactgtcgtcccctgcgctgaatatgcaaggcagctctgtctggagtccccaccgcctccacccccgccaacctcatcatttttctccctctttcctgctgttagttcttcctaggattgtcagtgtgcctgctggcctgtggcagccctgtccgccttctgagtgattggctgtcagtctgccggtagctgaaaagtaaataacttaacatgttagaatttgcataaagtaaggaaaactggagctgagtacaggacttgaactgcgccatctcctctaggccacagaggcctttttgacccccttccaggtctttagacattgtcaggcagtgaggggtcgtagctgccagtgtctccatggtagcgtgctctgccagggatgcagaagattctccagtcattcctccagtgggcacttcctgcaggtcctgtgcccatggctgggagtggtggctgtcattgttctctgccagaagggttagcagtgcatcctgacctgacttatgtggcgcccagattcctggaaggggtctaaaaatggacctagacttggtgtagaacgtgtgcctcttggcctgccaccatggttccctgcctggttttgtgtgtcagctctgccgcttaagaactgagtggcttcgggcaagttgttctctctcataggagtgtgtgaagatgaagcaacataagctgcttagcccagcgcccagtacctcacgcagacataagtgctcagtaaatgttgtctgtggtggggatggttgtcaccaacatctgaagtgcacttctaggtcatcaggtgacatgattggcgccaacacatggtactcttgatttagcacatctcagctgaggcacctcattgatatttgtttaaaaacaaaaacaaaaaaccttggtgattctgctgtgaagtcctggccagaaacctccagaccgctgatcaacacgcaacagaaccatcaccgttcacctctttgacatggtgccaggataccctggatctctagcttttgctatagttgctctaattagggaataatcttgtctttaatattcctttgctacattttttaacatttcttatctaaatggttttatgaatcagttttacagagaaaaaaaaccagtatttaaaatattcttccaggggctggtccaagtacagtagtgtttacaactatgtgatcacaaccagttacagatttctttgttccttctccatccccactgctttacttgactagccaaaaaaaaaaaaaaaaaaagttattccagggaaacaattctccaactttttcactcccaatctcactcctcttatcttcctcccgtactcctatcctcctcccgtactcctatcctcctcccctactcctatcctccagtagaaacagtcatttgctgtgaaggttatgggggagaatgagtcaaggtagaaggtcacctgctgcccagctcacagtgctgctggtgatgacagcagtccacagttacaggcacttgctgaacgaggggctctgtatacacctcagctcattgactcttcccacaaccctcttgtcacctaccatttagcaaatgaaaaaaccaaggctctgaggtgagttgtttgcccagagtcacccagtgctgtttgaacccactcacataaccaaccaataccattatgtaatttttgaggtcttttatctctgtgatccacttaaaaattatccaagtatctttatttgtactaagcctccataatgagaaacagtgttccagatggtggctagttttcaaagacatctctctttggaattcttctttagaacaaaaagccccagaccacttatccccattcatatcccctttggacctagggagaaggtactatttataggtgatcacctgagtttattgtcccttgtgctgtgccagaaataaaggtccccacctgctcttattagctctactaacaggataaggaaagtggccctcagagagctactgcttttgtgacaaacaaatgatacaagaaaaaaaaagtggctttttaattttagtgacctggggcaggacttccaaatgaaagtttatttctaaaaactaaaaggtaaatttaatatactttcagtgtttgggcttaaattctctttcaagtgtctttgtgatatgctctgaattttaaaaatttagaatcattgaagttcattatacttgaactttaaaaaaaaaaaacaaaaacctcgtataaaggtcaaggtatgacttcatgctgctgtgtacttaggtcatttaatcttcaaaccactggatagaggttaggttgaagttcgatcttaaatcctacctactgtagctcattgtaccagcaacagctgtagggactaggtggaattcatggtgggttttgttcccttttaaagattgaagccaccatattttctgccctctaaaagtttatgtcagccaggcatgggtggctcacacttgtaatcccagcactttggggaggctgaggtgggtggatcacttgaggccaggagttcgagaccagcctggccaacatggtgaaaccccatctctactaaaaatagaaaaattaggtgagcatggtggcctgcgcctgtaatcccagctactcgggaggctgaggcaggagaaacatttgaatccgggagatggaggctgcagtgagctgagaacatgccactgcactccagcctgggtgacagagtgagactcttgactcaaaaaaaaaagttatgcatcagagaacagatcctttgatgccctcctctgccctgaaaggtttttgggggagagtaataagtatcacaacaagatatgacctgagaacagatttcccagataggacatgatccatgttttaatatggcttactgctgttgcttcatagtgtgaagcttcagacacttctgaaaaccctttcagaaaatcccagtcgccccatactgatgactaatctcaactaaaacagggcttcagccagtgtgaatgccactaatgccaccaactcacctttgcttttctgtagggtgtgcacctgtatgtacacattcagcttttccgggattaacctctgagttctggtttgtctttcagttgaccatagtcggattaaactacatcaagaagataatgactatatcaacgctagtttgataaaaatggaagaagcccaaaggagttacattcttacccaggtaagcagattgtctgaattttctatttaatgtcaatttaagagtttgagagtgctgttatccacacctcaaataaaatctgccacatcctttagaaggtcaggatttcagcataccaaaaagcagcaaggaagggggaaaaatcatccttcaaaggttcagtttggttataaggaacgctaatcttttctgggaagcataagatgacattgctggaaatgagagcttatagaaaacaacattaaaatgccagagttgcctgtgtggtctgttggcagagacagcagagccatggctggaggagggtctgtacctgtgttgcttccagaagtatttgtcgtagagcacttgtgatggcaaatctaagaacgttagcagtagaccaggaatctctgtccagagccattcagagtagctcagcatggttctcattctttggccagaagaaaggcatcattggatcatgtgaacaagcatgaaaaatgacttaaaatttctgttggcttttggcatctttatggaaacaaaatcctgaaagtggtttaataattgagcctcttgtaaaacactcagtggcatgtgaccaaaagggtatctgggaaagaggataaaaagagtttctttttaattaatcttctcaagtcttaacttgttacctgtaagttggtctaaaaagactgggtttcttattttgtttttcatcataatttttgtttctcattccatgtcagctttcagtcttatatggctttaggccacagggcgattttgaacatttgtaattttgcttaataattaggaaattaaaattctggggaagacagaatgctctatgaagaaaggctgctttgagcaaggagctaggtcagggcgcgttcaactgaggcctttcttcactgcctttttgtcttgtcccagttcctccccatttatgactaaaatcagcccagatgcttctcgtcatctgggatgcagagcatcagcccagctgtgttcagtcctatggggccattgagtaagttcttggtgcatggatacagggcaggcctttaccaggccctgagcccctggtcctcccagcacctctggggtatttaggggaggctgatgggggagggggttgataaggcgggagatgtctggggatgaggttgaggcaaaagtgacttcttgaggactttgctttttggagaagtcaaatttcctacttcttgatttcagcccttcaactctggtatggagtcaggaagccctttaaatacctgttgtcgggtgtatcatgtcaagtgttgcattagcaaatgaccatgtatccttgtgctactgtcctgcctaccccgcatcctagcgcttccttgggacatgagaagctctgtctggtttgtgaggtggcactggggatgttgagaaactgtttacacagtttccctttgccctggggatttactaaaggagtcgaggcagcctgaccccaaagcatcacccctggacactatgaccgaaacatttccccagtgcccaaaccaagaacacccttcccatttttttttcagtggtgttcattatgtaataatacaagtctctcttctcattttttaaaagtcagaagtacagaagagcagagaataatgtccaaggggccctccttcacctcccccgtgcagtgtcagctaagtgtggtgcgtgtccttgcagatcttaggggattgtgatccttcagaccattctaaactggggtggtgctgggagttagggaaggcatgaagggagtagtggagagctgcagtgactggggtcttcatgccagggtggagaatgcaaggcccaggtggccagccatgtgccacgggatttctggctgccaagagctgtttatctgttcactggggagggaagagttaaatgtggtctgcttttctccgagtcccttcagcacagggagtgctgacttgtcttgttcaggtagtaagttcaagatgagctcaggaaagaaagtgagaggacactgagggctagtggttgagccaagtgtgatgggacttaaagggagaagatttaaagaataaggagcttatgggccggggacggtggcttacgcctgtaatcccagcactttgggaggctgaagcaggtggatcacttgggtcaggagttcgaggccagcctggccaacatggtgaaaccccgtctctactaaaaatacagaaattagctgggtgtggtagtgtgcacctgtaatcccagctacttgggaggctgagacaggagaatcgcttgagcccaggaggcagaggttgcagtgagccaggattgcgcccctgtactccagcctgggtgatggagcgagactctgcctcaaaaaaaattaaaaaaaaataaagaggttaggtgaaaatagatgagaatggaaaccatgagaagaagtgatgctggccaaggacatgacaggttctgatgtggaggtgataggcaatgtctcttccagccactgctaataattgagacaaactcaaggcattcataccctgtgtccagtaaacatctgtgcccattgccaggtgagctggattgaaatgggccagctgctcagcagacaccctcatgccccagtgactctgttccccttgggccacctcattgaccatttatgtttctacatctcctaagtttgttgggccaaggatggaggctgtctgccgtcagggtcctcattgctgatggtaggaatagttgctgatgtttcattggatgttgctgtattctagggactgtgctaagtactttatagaaatgaacatacttcattttcacagttttatgaatagggactattattagtcaagtaagcgatggggaaactggggcagggagcgatgaagtgacttgcgcaaggtcacaagatgatgtgattggaaccaagagaagtgttgtggttggccacgcccccacactgcctctcatctgcaccaaggagttttgtcccatagcccaagggccttggggacgaatctcagtggaggcccttagcgggcctgcctgagccagaaagcagaatcggcatttttctgtccttggttggcccagccctgaactgagatgcggaaatcgcctttcgctgcctggtagaaaatggagctgcagttactgaccaccaggcagagagaggtgggtccctgtcccagcctcagccaccactctgcctaagctgtggggactgagggcgctgtcgttagctgactgcagaaggtgagcacacgctgtagcatgttatgtttcagatgtcacatgttgtgttattgtgtctttgcagggccctttgcctaacacatgcggtcacttttgggagatggtgtgggagcagaaaagcaggggtgtcgtcatgctcaacagagtgatggagaaaggttcggtaagtctcggcttcatttgctgtgtatgtgatcatgcataccactccatatagttaccattttcgtccagatttttaaattatttttcttgcctttgtatttcctttacgtagtatttttatttaaaaaaattaaaacagcagcatataaatgcatgttggttgtcaaccagttaatgaagtgaataaaagggaggaggcggaagaactgcacggacctcttcgcccccgccttctcctgtgtggtgcgtgtggcgctccgcccacctgtgctgcctgtgcggctctcatcacagtgtggagttgtgtgtggagttatggagacctgcttttatcttgaaaagcaagttcttagtgcatcttcatggtgtctgattttttggctggtgagagtgtggctacctctgcggagctgtgggagcggctgactagatgagatttgcctccattcagtacctagactcttgccctgccacacctcttcggagtgagcattgacttcaggatgtgtgtcattctaagttcctgcaacttttcaaacacccctcgggctagcgtgtggctgcacggtgtccatttgtgcaggccaccactcctcttgcatctgggtctagccacctctccttcttgacttaccatagttcattttgtaccatgctttcagaatgagctttctcaaatccaagtctcaccacggttcttcccagctgaaaacccttgtgcggttccctttgcctcacaggataatacatggtgtggcttacggaaccctgcaggtctggccctaggcccctggacacagacctctcaccactcttggaactttagccaggacaaagttttctgtttttagtttcttaccatgttctctgggccgaggagtcccagtgcccacgttcatcccacttgcaggcacccctggacggctgcccccagctccccaactgcctgcattctcccctgccctcctcactctgttggaatagctgagaatagccgatttctgggcagccggcctcctgtgtagactgtcctgtgtagactgtcctgtgtagattgtctgtgtagactgtcctgtgtagattgtctgtgtagactgtcctgtgtagactgtccatgtaaactgtcctgtgtagattgtctgtgtagactgtcctgtgtagactgtcctgtgtagattgtctgtgtagactgtctctgtagaccgtcgtgtatagactgtcctgtgtagactgtctctgtagaccgtcgtgtatagactgtcctgtgtagactgtctctgtagaccgtcctgtgtagattgtctgtgtagaccatcctgtgtagaccatcccatttagaccatctgcctgtgcaggcgcaggccagtgttcagcagggccacaggctcctcggcctccctgccctcgctgctccccaacactgccaaccctgctgcggggtccaggaggagatgggctgaggatcgtggagaccagcaggagcgtgtggcccaggagcagggaactgggtgtccttgggccttgccaggtccaggctcagctaggacacggctctcacagctgtcctggttgcctccggccacagaagaaggtgagggctccagagaggccacctttccaaaaaaagcacagtcatggccctagaatgtaaaaaatccaagtgttaagaaggaacacatcaaaggaaacttcagcagtgaaaacttgaagcattaaccacgaagcctctgcctccaccacacacaaagaaacggctttagttactcgcagaaagtcttcctcttaggacagcgcgtgtttaaaatcataggggtttggtttgttttgttttggggttggggttttttgggggttttttacccttgcctactttttaaaaaatgaaagtgtttatttgcccaacaataacagacagggagcttgcctaagtgttctgttgatgatataatgtatcttgtcttagaaaaaaactttttcagtgaaaggtggtttttaaattttttcttccctccttagtagcttgattagtaaaatgtgaagttacaaatgtgaagcaaacccccacccttcaccactagtcagcaattttgagtaaagaaacaaagcatcaggtgctcacagcacacactgtcttagagggaaggggaagcctggtggcctgtggaagccttcagcatagctccatctgcaggcttctgaccctcagcactactgacacttgggctggatcattgtctgctagggatccgggcagggagtggctgtgctgggcgctgtaggaagtttagcagcatctctggcctctatccaccagatgccagtagcaccccctccccagatgtggcagtcagatgtgtttctgtctagactccagactttgtccaacgtcccctggtaggccaaattgcccccggttgagaaccaccgctctagatggtattgagggttgggaattttaaatcaagacatttattcagaaattaccagatatagtagcatttgcttcttatttatttctttgttgctaagtgtttggcaaaacctctttgctgtgagcacaaggtttgctttagcaattgttgtcacattacagcaaggagtggtgtccagcgctgtagttatgtatttgagcagtgtccagtgctgtagttatgtgttccagcctcaccaggccctgtgcttcattgtctcccactcaagactgaccacaaatggcccacagatccactgtgacaacctttccctttgggttactgtggtggcatcgagaacatggctggttggctttgctgtagtttactgtgataactgtgccagcagtccctgctttcctttgttaagtatcccattccactggaggattacttgggcgtgcagattggcatgaaaagcaatgtatggtttgagattgttaaagtttctttgggatcaacattttcaattctgtatcagcattatccctcccagagggctggctgggagaaatcatgagaagttacagtatcttatttgctcagctaatctaattataaatgatccacacagcttgtggtaaaaccagcttttggggagttttcatttaatgcatacttgtcttctgatttccttccttcaccaaatagtgtaggatgctccctcttatttttggcaaacatgcctgttatcttttgggaccctgggcttcctggaaaccagttatgcagaagatgattgtgtgtgttagactggggtcatccagatggctagagttctcactggttctgtttaaggattgactttagacacctcagtgtaggctgcaccatggcgtaagggttgggattgttgtttagaagggggaagtaagcaaggtgagtttaattggccattgcagaatctcacccgtatctccctcctgaaatcctcactaaagctgccgtttgctttcaggtgctttcatgcacaagacactgcattttgtatcacagggtccatataattcatttttctctcgtacttagttctctgtgttaagaattacttacttagttctctgtgttaataatttttggcgaaaccaaattacccgtcacagggttactgtagatgtctttcataggttttccaaacaccacttgcccacttgtttgggaaggccccaaggactgtttaacatctgccttcatggtggaaacagcaactatgagagatgctagcatgttggcactgccatgttcctctggtaccagcccaagataggactcaatttgaggcctggtgaagtactgtgttctaataaaaatccatctacttttcatggccgtatatatcaatgtaatagggtaactggaaatgtgatcttgtgccttttaaaaattttgtgtgtttaaaacaaaaatttctattggaaatgacagagcatagcttgttgctgtagacacctgagagtccttaaaaataaatattgggttattgacacttagttgcatgacagaattcctcacttgtacagttccaaagtcttagtctttacccagattacagagggttattaagcattaggtttggttttgaaagtgagtgcttgctgtctggaggtgagctttaagactcgtctgccctgcttatgagatgaggaagggtggcctcttcctcctgcatttctgttcttcgcttccttctctgtctgctcactctgtggaatgcccaccccagcacgggtggggtggaacctgtcagatcagtctcttgtttctggggtcttgaggcattataagatctagttgttagaagtgtgggattaattcatcttttcacattcttctaagttcctgcttttagctgccacacccactttggctaagtgggggtcttgccatgtaattagcgcctccatgccaagtggcagaattgcttcaatggtgacagattgtccccattcaagagttcacttttggcaactcatcattgatccaggaaggtgacatggatgaaactggctaagacttcagacaggcttgtgtccagactcttgagaaagctctgttggcttctggtctggcactgtgaagtttgctgtgatgctggcaccacaacctggtgtttcctaatttgtttctcccacattttgctttggttttgtcttttgggcagcttccagctccagtagagcaggaccaataggcatttgtggttctatattcaccctcctcacgtgcttcctggctcctcattgcccccagatgatgccacaggtccctgggcctgctgccagtcgtctgtgatctgggcctctgctggccccttctccagctgctcttttcagcctcttatttgcagtcactgcctaggaaatcctagtcatccttcaaaacctgcctcttgcacagagctttctctgatctctcttttctgtaaccttggctgacctgaaacatttccctcttctgaattcctgctgcatgtccgtagcatttccccctcagccctcccccatagtccaccttgtcactgctgggcacagcagtgtcttctgacagacagctggccctgaagtggttcccttcacccacaccatcctttgccccagaggaggtattgagtgggtcagtgcacgtgaactgccagtgtcatttgccaaagagctgttgacacacgctgacatttcttttgctgaaaatcataagggctttgagcttccctctgtccaggcacatggtcaggctgacccggtagctctgcccctgctgacctgccatttttgtccacaacagttatccatgagcagaaacatttgtgtaactgaggcagaaacttagttcaagtaaaatgtcactaaattcgagtcagtttttgtcttagaccctaaatgaaaccaaattttcataaattttcttgttttaaagaaaaatttaatgagctacatttaaactgagaacatcagatagtgtctgagattatcaaaatagaacatcaaaagtatttttctgaatgaactgaaccaaaccagaatgaaagggcaagccctggggagcctgtctccaagccttctctgaaagggagtctgtatttggtgataactgctcagcctctccaaagggcctcacctgctgtctctcccagttttatttttaattgcctgtgagttttctgtgcagggtaaggcacctacattctatgccagcagcctgatcaggtcctgggtaatgtttgaaatggctacacagaggagtttcaaagccttttgttcaatctggcttcacctcgtagacggtgagaaagcgtcagagccctgcaggatcccgttgccacgtttgaccggggagccgatgggtttggaagtctgagccctgtctgcacaacctgccccggtcagcagcttcgtgcccccacccccatctccccatgaggcaggcatctgtgctgaccatggcttccatgttcagaaacccccaggcctttgagttatcatgaagcttgtgggatgtgctccaagcctcctgccatagaaaaactgccatattgctcacaataattcactattatttgtttccccagttaaaatgcgcacaatactggccacaaaaagaagaaaaagagatgatctttgaagacacaaatttgaaattaacattgatctctgaagatatcaagtcatattatacagtgcgacagctagaattggaaaaccttacagtgagtatagcacacacttcagcacttcaggcggctactggttcacatgcctcttcctttatcccttgggtgatattacctaatgtcagtgttcctggcttttgtataccccgagcaagatgtggtttgggcactgtggtgagcggagcttacttgtgtacctaccaagtgcccagggagggtggaggccacagtgctctctctgacctttaacaacagttaacaccagttcttagggaaaggagagtttcttacccaaaagactggttcctgcttgtgcagctgcagagggactggagcggcagcctgcaagtcccagtgaagcatgctgccttctttgtggtcctcagtcttcgagtctgaagagagggaagaaggggtataggggctcactccagtttcatagctagtgaaagttttctgggccaggtcttgggtttttttgttgtgggaagagtttataacaccagctacttgcttggtaaaagttggtcttggaacatggcaaggcattgtggcaagcagcactgccgctgaacgcgctgctcctggggctttggaataattcccctggatccgtaacttgggggtgttcatgtcattctggggaacagtggagggagtgcgcggcagcacctgggggcaccagtgaagagtggccagccaccaacctctagaacctaactggggtcgaatcctggccccaccttactagctcatcacagtgtctccgtttcctcttctgtcaaactcaggttttgcgagggttctgggaggtcctatacgggaagggttagcagttaccatgggtgtgtagcacgggctttatctgaagggaaggtggagccgtagggagaccatgtggagtggggctccagggctgtgtgggtggggagggatctgcttctgggttaccccatgcctccccttctcaagtactactttttaatcatcatggctcctgccattcatttcatagttgatgtaagccaggtgcggtggctcacgtctttaatcccagcacttggggaggctgaggccaggaggatcactcgaggccaggagttcaagaccagcttgggcaacatagtgagacccccgtctctacaaaaaaacaaaaacagttagtcagacatcgtggtgctcccctatagtccagctactcaggaggctgaggcaggaggattgcttgtgcccgggagttcaaggctgcagtgagctatgcttgcaccactgcactctagcctgggtgacagagcaagaccctgtctcaaaaataaataaataaaaaaaatagtagaagtaagatctagaatgtagcacaggttaccaggacgtaggcaaggggttcgggctgcctggctcttgaggatggtagcagtgcagctgatgtgagtgctttctgccctctggtggtgaccgcgccggagtcaccagccctgccatagccctgatggggcagagggttctgagtacggtggatggaggtgctttctggaagattctcaggagtaacatgggcagtgtgttggaatgtgctagaggatttatgcagtagccttttaaaagaatgctttttagcatttgcaagcctgacattaagagtgacttctgggaaactatttgcttgttgagggaaactgaatttcaacagagcagaagagctgtgcgctttttgcttggcagagtgaatacagccagctcagaggttttgatgttaggatctgtttgctccaacagactttgtttttaaaaggcttttctcagccatagctgtctgttctagcacaaggctggaatgagttccttgtgaaagaggtgagcaggtgtgagggagggtgtcagtgggcggtaacccacaccttcaaggattaaaggaaaacttgcatttggcatgcttgcttcttattcaattttaaaatacattttaacggccgggcacggtggctaacacctgtaatcccagcactttgaggggctgaggtgggtggttcacgaggccaggggttcaagaccagcctggccaagatggtgaaaccccatctctactaaaaatacaaaaaaaaaaaaaattagccgggcgtggtggcgggcacctgtaatcccagctactcgggaggctgaggcagagaattgcttgaacccaggaggcggaggttgcattgagccgagatcatgccactgcattccagcctgggcggcagagcaagactctgtctcaaaataataataataattttttaaaaatacattttaagtccttttcttccccacctgcctccacccaccaaatagaagaggtatttcttcttctttaatgtcattaaggttatatggataccattttctagagaggaaagaatgatggaattgcctagtgtgagtctagcaattatcctaacatacacaaatttctccttgttctgtgccaagatactgtatttaatatttaatgaacattaaatattatttactagtgtatttaatggctgaggcagggttaaatatgtattattttcatcccagcagagttgggggaggtcctagtaactatgccatgagctctgtgagggtgaggtggtgtctttgcccccgcctccctggcacagtgactggcacatgattggcatagtgtggacattcgtcaagtgaaggaaggcatcatgagcagatctctggcctgaatccttctgccatcagctgctcgccaggtggccctggcactgggccacagggaaactctccaggctggtatggttcctgtctgtggctgtcttcccgggcccatgttaggagactttcacttccagagccctttccctctcagggccttgcttaccaagtgactggttcccatttactaggagctcttaggtcattgaagatgttgcgtactccccccagtgagggctgccttttgatcacagccgccagaagcctcaaggaaggagcagagctggaaacagacgccaggccattgcttctgttcctctggggcagacccagccacggaagagacattctgggacaagggctggggtccacctttcaaacgtgtctgcagcaggctctcagcatggactctctgcctccaaacatccacctcctcatcggaaaatggatgggagtgcctgcctggagcagctggtgggagagcgcagcgccagcacgtaggacacactcggttcatgggctgatgccgttcgcattgactgcctcttcagctgggtgttgagccacaccttggagtcaccagtctttggagaccaagtctgctacttttttctctaaagtgacaatcctctgaaacctccagatcatcttgaagcccccgtctgaaagttgcccagagccagtgcctcacctgctgttccttgttcactttttcacgggaggccttgcagggctttatgacaagattttatgggtggctgcccagcatcattgtgactcgtgagacagagagaaaccagttgtaaccatgtagacagtggaagtgatagggagaaaagaggtgaggggactcttcaatccgaagggaaatgaagtctaagcaggcgcaccctgcaggttcagtgtcaagcccagggcctggccccagggtgtggtatttgttgactgggtgtgtggaccctgggagaaagtctgagaatgaatgttcctcttagaggtagagagtggaaggtgactctgtgtgtacttggaattagtgatttctgtacagatgattcttttagaatcatcatgagtatttttctctttcagacccaagaaactcgagagatcttacatttccactataccacatggcctgactttggagtccctgaatcaccagcctcattcttgaactttcttttcaaagtccgagagtcagggtcactcagcccggagcacgggcccgttgtggtgcactgcagtgcaggcatcggcaggtctggaaccttctgtctggctgatacctgcctcttgctggtaaggaggccctcgcgggtgccctggggagctcctctacctgctctgctgtgatgttttttcctaagtagaaactgaagcgctcctcttccaaaatacagagactcactgtgttagtctgtttttgcgttactaataaaggcgtacctgagactcggtaatttgtaaagaaaagaggtttaactggctcccggttctgcaggctgtacaagcatggcaccagcatctgctcggctcctggggaggcctcagggagcttccagtcatggtggaaggtgaaggggagcaggagcaagagatgggggaggtcccagactcttaaccagctctcttgtgaatgcattgcctcagggagggcaccaagcctttcatgagggacctgtccccctgacccagacacctcccacccagccccacctccaacactagggatcacatttcagcatgagattgggaggggacagacatctaacggtgttattaacgttgcccttgagaattggacctggctgacttatatctcctctctggctttcagatggacaagaggaaagacccttcttccgttgatatcaagaaagtgctgttagaaatgaggaagtttcggatggggctgatccagacagccgaccagctgcgcttctcctacctggctgtgatcgaaggtgccaaattcatcatgggggactcttccgtgcaggtcagcattgcctttgtttgaatccaggtgtgaccattttaacttttttgtctttgaaggaggctgtcagttgtaaaagttcaaacaccgtctggtgtcaggggaaatagctacccttcatgtttaaaatagctagaaagttgtcaaaatgttcaccatgttgcactttgtgcctttgaagtgctcacatagagagcattgataggaagacgagactttattttcaaaagatttcatcttccaagtacatggctgcagccctgagaggccgagagcccctcgccaagccgtcacctctgctcatgcaaagggatttcctgacaaaccagccgaagtgaacactaataggacttcctcttgctgctctttcaaggatcagtggaaggagctttcccacgaggacctggagcccccacccgagcatatccccccacctccccggccacccaaacgaatcctggagccacacaatgggaaatgcagggagttcttcccaaatcaccagtgggtgaaggaagagacccaggaggataaagactgccccatcaaggaagaaaaaggaagccccttaaatgccgcaccctacggcatcgaaaggtaatatgattgggtcccagcttgttggggtgaggggaaatgactttctgttctagaaacacacgctggtactgaaaccctgtggatgcagcctcctgttggcaagcagcgcttccgcatccttggggaacagggcgcgtggaccacagccactccactcctggctgctggaggtccggtattgggcacagggtggccgcaggacatgagccacttctgtgggcttctagtgccaccttgtggtgcttgttggaatgaggggctcggagccaccgagtagggtttttctgccccccctgacgacagcgccctcccccaggtttccggacagtcctgaaatgtgatgtccaggcttgagtgccctcagtccccacagtggtcctttggggaatgtaaccttttttatgtggtcttgattaaatcccattttacttccttgcaggttaacaaccattattgagtacctattgatatgtgtggtgtactgagttaactagaacatgtcccctggtctgtgttctagaccatcttgctgggaaaaaggcagacccaaagcatattttggtgggggcccatggacagtgatgtgatagaggtgtccgctgaggtggtcagggaaggctgcttgcagtaggtggccgtgcacggaaagtttgcagaatgagcaggtgttagttccagctggagatgactgccggctgtgcccttggtacctgctttctggagggaagttttaagacgtgtgcatacttgacccagcagttgtatacatggagaaatttactttgcagcaactctcaaaacaagcgtgtaaagatgtgtataggtagttgtgtttgttgtggcattgtttgtagtagtgaaaaattagagacaggccaatgatataaccagggacctgatcaattatgttctctcccggtgttgggatattctgtagctcttaaagaatgagatctgggtgtactgatgtggccagacattgcaattgcagtacatgagaaggcaaatcatacagtagtgtgtacaccagtgagtcctccagccagataaatcctcacagtgaccagtcgcccaggcaccttgtgaaccctaccctgggtgtgggtgctatctgaagtacctgggggagggggtgacaagtggacttcaggctgatgtgggccctggcctggccctccctccaagcagagggggctggctcgctggaaggttaacatcatccaactctgtctacacgtggcttgttttttcctagaattcctgccacaatagcagcatccttgccattcattttctccaaagtgagtaacccatctctgccctctgattcctcagcatgagtcaagacactgaagttagaagtcgggtcgtggggggaagtcttcgaggtgcccaggctgcctccccagccaaaggggagccgtcactgcccgagaaggacgaggaccatgcactgagttactggaagcccttcctggtcaacatgtgcgtggctacggtcctcacggccggcgcttacctctgctacagggtatgtttccactgacagacgcgctggcgagatgctcgtgtgcagagagcactggccgctagcccgatggtaggattcagttctgtggtgcatctgagccagtctcagaagaaacagatcaaaggtttttaaagtctggaactgtggaagggctaacaagagaattaaggatcgatgcactggggttttaaggagccctctggtcccaagaatataagagtctaatctcagggccttaacctattcaggagtaagtagagaaaatgccaaatacgtctgtttctctctctctttttttttttattcctttgtttttggaaaaaaatagagttacaacacattgttgtttttaacctttataaaaagcagctttttgttatttctggaacaaaaaaaaacaaagtaggcacttatgaaactttctcatacccttaggtgatgtaatcagccatataatttatatttgatttcccagggaaggaatcccaaacttttacgaatgtaaactcccttggagaagagggttaggacgctgttgcgctcaagcccccctcagctgtgtgcacactgagccaggacagggtctttgagctttcccactataagaagaacagcaacaaaaggccgtctagaaaaacagaacctgcctctgcttctgctcagggtgtccccgctgggtttccattgtcctttctccattgctccctcctgtgacagccatcttgctcatgtaccagccctcatcaccccatccccataaatgggtgtcctcgaggcctctgcctgggggtcagaggtcaccacagggtggccattggcatgtcaacccgctgttaattcagagaagtgggctccacctcattgggagaagtgccatttcagcagaaattcacacgttagacgtgtgttgctgttaagtaaggggaagagagaggactagcctcagagctctggccatggaaatgacctcctaagactttttcgtggttttaaatattttacctctttccaggtggcatctgagtacatcagatggttttgcaaaatgcaaacaattttttccttggggatgatttttggggagagggggctactgtaaaaaataaaaccaaaaccccctttgctccctcggaggttgaagttgccggggggtgtggccggggtcatgcatgaggcgacagctctgcaggtgcgggtctgggctcatctgaactgtttggtttcattccagttcctgttcaacagcaacacatagcctgaccctcctccactccacctccacccactgtccgcctctgcccgcagagcccacgcccgactagcaggcatgccgcggtaggtaagggccgccggaccgcgtagagagccgggccccggacggacgttggttctgcactaaaacccatcttccccggatgtgtgtctcacccctcatccttttactttttgccccttccactttgagtaccaaatccacaagccattttttgaggagagtgaaagagagtaccatgctggcggcgcagagggaaggggcctacacccgtcttggggctcgccccacccagggctccctcctggagcatcccaggcgggcggcacgccaacagccccccccttgaatctgcagggagcaactctccactccatatttatttaaacaattttttccccaaaggcatccatagtgcactagcattttcttgaaccaataatgtattaaaattttttgatgtcagccttgcatcaagggctttatcaaaaagtacaataataaatcctcaggtagtactgggaatggaaggctttgccatgggcctgctgcgtcagaccagtactgggaaggaggacggttgtaagcagttgttatttagtgatattgtgggtaacgtgagaagatagaacaatgctataatatataatgaacacgtgggtatttaataagaaacatgatgtgagattactttgtcccgcttattctcctccctgttatctgctagatctagttctcaatcactgctcccccgtgtgtattagaatgcatgtaaggtcttcttgtgtcctgatgaaaaatatgtgcttgaaatgagaaactttgatctctgcttactaatgtgccccatgtccaagtccaacctgcctgtgcatgacctgatcattacatggctgtggttcctaagcctgttgctgaagtcattgtcgctcagcaatagggtgcagttttccaggaataggcatttgcctaattcctggcatgacactctagtgacttcctggtgaggcccagcctgtcctggtacagcagggtcttgctgtaactcagacattccaagggtatgggaagccatattcacacctcacgctctggacatgatttagggaagcagggacaccccccgccccccacctttgggatcagcctccgccattccaagtcaacactcttcttgagcagaccgtgatttggaagagaggcacctgctggaaaccacacttcttgaaacagcctgggtgacggtcctttaggcagcctgccgccgtctctgtcccggttcaccttgccgagagaggcgcgtctgccccaccctcaaaccctgtggggcctgatggtgctcacgactcttcctgcaaagggaactgaagacctccacattaagtggctttttaacatgaaaaacacggcagctgtagctcccgagctactctcttgccagcattttcacattttgcctttctcgtggtagaagccagtacagagaaattctgtggtgggaacattcgaggtgtcaccctgcagagctatggtgaggtgtggataaggcttaggtgccaggctgtaagcattctgagctgggcttgttgtttttaagtcctgtatatgtatgtagtagtttgggtgtgtatatatagtagcatttcaaaatggacgtactggtttaacctcctatccttggagagcagctggctctccaccttgttacacattatgttagagaggtagcgagctgctctgctatatgccttaagccaatatttactcatcaggtcattattttttacaatggccatggaataaaccatttttacaaaaataaaaacaaaaaaagcaaggtgttttggtataataccttttcaggtgtgtgtggatacgtggctgcatgaccgggtgggtgggggggagtgtctcagggtcttctgtgacctcacagaactgtcagactgtacagttttccaacttgccatattcatgatgggtttgcattttagctgcaacaataaaatttttttctaaagaacatgaatttggggtgcttcccatttttttctttgcttaatagagctaaaccaggatgagtaactcctgtttctttctatccctgctgatgtgaaacagatgttgtcaatcagctggggttagagttttccacttctaagaattaacctcagcatccctgcattgccagcaccctcaggctggagcgctttccttgactgtgagcttgttgaacaccttaggcctcagcccatttccttcccaaattgacgctttgcctgtgtagggccctcagataacttaacaaacttaccagtgttgtttgaagaacagtgttttgagttgtaatctcaaaaccatatcccttacccaattacctgtaagacacaatggttaccacatctcagtacgtaaagtccacttgatatagaattgacttagaaataagacagattagtatagtttttcatttgtgtacaaaattaaacaatgtaaattccccccaaagtgatttttttgactttttgaagtaattttggacttgcaaaatgttgccaaaatagtacgaagagttccccagtaccctcgaagtttcctcgactgtttcaaagctggctgcaggcccaggctcatgagactgggaagaggacaggctgtggtcatgtggacccacaggggcctggggctgcagaagtcagtgtggcttccaccatttcaggtataaaaaagggcatctaagctttcaagaagagggaggatgctctagggcagcggtccccaaccttttctggcaccaggaaccggttccatggaagacaattttttcacaggcctgggggtggtgagggatggttttgggatagaaacttccacctcagatcatcaggcatcagattctcataaggagcttgcaacctgatctcttgcacacattcagttcacaatagggttcacgctcctaagagaacctgatgctgcagctgatctaacaggagatggagctcaggtggtcatgctcagtcgctcgccactcacctcctgccatgcagtccagttcctaacaggcctcagaccagtaccggtctgtggcctgggggttgaggacccctgctctaggctggtactgctgatgcttaaaaagagagggtttgccagaaatcagatgggacaaaagggcaaaggccgtgccacagagtgcccatataggggagagcacgcctggagccttcgagagcatgcagagaagcctggagactgcatttaccggagctgctgcctgaggccaccctccaagtgtccccacagcgcaccacaagaccacaggagtgacctcctcactggcaggtatttggggaaacaactgctgtctactcttttgggtaaaaagtgaaacaccaatagtttaattgaaatttcagaaaattgaacatatgaacaaggcaaataaatactaagtaagttaaaaacacaaaatatgtccaggaagtatcgatgagaatgttcaagttaaagttctccaatgccattgctacagcaacctcaaaccctaggttctctctgcactattaacacagacatctcaggacatggtttgcttttttttaagacttaaataggaaactaatttttctttctttaaagcaattgcgttcttcagtgaactctttctttaggccagttgatggcttcttagcagtttattgacgagatcctagggtagcttccgaagctgggttgattgattgcatttgggtgcggatggccaaagtgagtggccctactgcctgtgctgctcagggctcctgggctgatgtggtggct

SEQ ID NO: 15 - DNA, 4978 bp, homo sapiens
ggtttccggagctgcggcggcgcagactgggagggggagccgggggttccgacgtcgcagccgagggaacaagccccaaccggatcctggacaggcaccccggcttggcgctgtctctccccctcggctcggagaggcccttcggcctgagggagcctcgccgcccgtccccggcacacgcgcagccccggcctctcggcctctgccggagaaacagttgggacccctgattttagcaggatggcccaatggaatcagctacagcagcttgacacacggtacctggagcagctccatcagctctacagtgacagcttcccaatggagctgcggcagtttctggccccttggattgagagtcaagattgggcatatgcggccagcaaagaatcacatgccactttggtgtttcataatctcctgggagagattgaccagcagtatagccgcttcctgcaagagtcgaatgttctctatcagcacaatctacgaagaatcaagcagtttcttcagagcaggtatcttgagaagccaatggagattgcccggattgtggcccggtgcctgtgggaagaatcacgccttctacagactgcagccactgcggcccagcaagggggccaggccaaccaccccacagcagccgtggtgacggagaagcagcagatgctggagcagcaccttcaggatgtccggaagagagtgcaggatctagaacagaaaatgaaagtggtagagaatctccaggatgactttgatttcaactataaaaccctcaagagtcaaggagacatgcaagatctgaatggaaacaaccagtcagtgaccaggcagaagatgcagcagctggaacagatgctcactgcgctggaccagatgcggagaagcatcgtgagtgagctggcggggcttttgtcagcgatggagtacgtgcagaaaactctcacggacgaggagctggctgactggaagaggcggcaacagattgcctgcattggaggcccgcccaacatctgcctagatcggctagaaaactggataacgtcattagcagaatctcaacttcagacccgtcaacaaattaagaaactggaggagttgcagcaaaaagtttcctacaaaggggaccccattgtacagcaccggccgatgctggaggagagaatcgtggagctgtttagaaacttaatgaaaagtgcctttgtggtggagcggcagccctgcatgcccatgcatcctgaccggcccctcgtcatcaagaccggcgtccagttcactactaaagtcaggttgctggtcaaattccctgagttgaattatcagcttaaaattaaagtgtgcattgacaaagactctggggacgttgcagctctcagaggatcccggaaatttaacattctgggcacaaacacaaaagtgatgaacatggaagaatccaacaacggcagcctctctgcagaattcaaacacttgaccctgagggagcagagatgtgggaatgggggccgagccaattgtgatgcttccctgattgtgactgaggagctgcacctgatcacctttgagaccgaggtgtatcaccaaggcctcaagattgacctagagacccactccttgccagttgtggtgatctccaacatctgtcagatgccaaatgcctgggcgtccatcctgtggtacaacatgctgaccaacaatcccaagaatgtaaacttttttaccaagcccccaattggaacctgggatcaagtggccgaggtcctgagctggcagttctcctccaccaccaagcgaggactgagcatcgagcagctgactacactggcagagaaactcttgggacctggtgtgaattattcagggtgtcagatcacatgggctaaattttgcaaagaaaacatggctggcaagggcttctccttctgggtctggctggacaatatcattgaccttgtgaaaaagtacatcctggccctttggaacgaagggtacatcatgggctttatcagtaaggagcgggagcgggccatcttgagcactaagcctccaggcaccttcctgctaagattcagtgaaagcagcaaagaaggaggcgtcactttcacttgggtggagaaggacatcagcggtaagacccagatccagtccgtggaaccatacacaaagcagcagctgaacaacatgtcatttgctgaaatcatcatgggctataagatcatggatgctaccaatatcctggtgtctccactggtctatctctatcctgacattcccaaggaggaggcattcggaaagtattgtcggccagagagccaggagcatcctgaagctgacccaggtagcgctgccccatacctgaagaccaagtttatctgtgtgacaccaacgacctgcagcaataccattgacctgccgatgtccccccgcactttagattcattgatgcagtttggaaataatggtgaaggtgctgaaccctcagcaggagggcagtttgagtccctcacctttgacatggagttgacctcggagtgcgctacctcccccatgtgaggagctgagaacggaagctgcagaaagatacgactgaggcgcctacctgcattctgccacccctcacacagccaaaccccagatcatctgaaactactaactttgtggttccagattttttttaatctcctacttctgctatctttgagcaatctgggcacttttaaaaatagagaaatgagtgaatgtgggtgatctgcttttatctaaatgcaaataaggatgtgttctctgagacccatgatcaggggatgtggcggggggtggctagagggagaaaaaggaaatgtcttgtgttgttttgttcccctgccctcctttctcagcagctttttgttattgttgttgttgttcttagacaagtgcctcctggtgcctgcggcatccttctgcctgtttctgtaagcaaatgccacaggccacctatagctacatactcctggcattgcactttttaaccttgctgacatccaaatagaagataggactatctaagccctaggtttctttttaaattaagaaataataacaattaaagggcaaaaaacactgtatcagcatagcctttctgtatttaagaaacttaagcagccgggcatggtggctcacgcctgtaatcccagcactttgggaggccgaggcggatcataaggtcaggagatcaagaccatcctggctaacacggtgaaaccccgtctctactaaaagtacaaaaaattagctgggtgtggtggtgggcgcctgtagtcccagctactcgggaggctgaggcaggagaatcgcttgaacctgagaggcggaggttgcagtgagccaaaattgcaccactgcacactgcactccatcctgggcgacagtctgagactctgtctcaaaaaaaaaaaaaaaaaaaagaaacttcagttaacagcctccttggtgctttaagcattcagcttccttcaggctggtaatttatataatccctgaaacgggcttcaggtcaaacccttaagacatctgaagctgcaacctggcctttggtgttgaaataggaaggtttaaggagaatctaagcattttagacttttttttataaatagacttattttcctttgtaatgtattggccttttagtgagtaaggctgggcagagggtgcttacaaccttgactccctttctccctggacttgatctgctgtttcagaggctaggttgtttctgtgggtgccttatcagggctgggatacttctgattctggcttccttcctgccccaccctcccgaccccagtccccctgatcctgctagaggcatgtctccttgcgtgtctaaaggtccctcatcctgtttgttttaggaatcctggtctcaggacctcatggaagaagagggggagagagttacaggttggacatgatgcacactatggggccccagcgacgtgtctggttgagctcagggaatatggttcttagccagtttcttggtgatatccagtggcacttgtaatggcgtcttcattcagttcatgcagggcaaaggcttactgataaacttgagtctgccctcgtatgagggtgtatacctggcctccctctgaggctggtgactcctccctgctggggccccacaggtgaggcagaacagctagagggcctccccgcctgcccgccttggctggctagctcgcctctcctgtgcgtatgggaacacctagcacgtgctggatgggctgcctctgactcagaggcatggccggatttggcaactcaaaaccaccttgcctcagctgatcagagtttctgtggaattctgtttgttaaatcaaattagctggtctctgaattaagggggagacgaccttctctaagatgaacagggttcgccccagtcctcctgcctggagacagttgatgtgtcatgcagagctcttacttctccagcaacactcttcagtacataataagcttaactgataaacagaatatttagaaaggtgagacttgggcttaccattgggtttaaatcatagggacctagggcgagggttcagggcttctctggagcagatattgtcaagttcatggccttaggtagcatgtatctggtcttaactctgattgtagcaaaagttctgagaggagctgagccctgttgtggcccattaaagaacagggtcctcaggccctgcccgcttcctgtccactgccccctccccatccccagcccagccgagggaatcccgtgggttgcttacctacctataaggtggtttataagctgctgtcctggccactgcattcaaattccaatgtgtacttcatagtgtaaaaatttatattattgtgaggttttttgtcttttttttttttttttttttttggtatattgctgtatctactttaacttccagaaataaacgttatataggaaccgtaaaaa

SEQ ID NO: 16 - DNA, 938 bp, homo sapiens
gttgactaagtcaataatcagaatcagcaggtttgcagtcagattggcagggataagcagcctagctcaggagaagtgagtataaaagccccaggctgggagcagccatcacagaagtccactcattcttggcaggatggcttctcatcgtctgctcctcctctgccttgctggactggtatttgtgtctgaggctggccctacgggcaccggtgaatccaagtgtcctctgatggtcaaagttctagatgctgtccgaggcagtcctgccatcaatgtggccgtgcatgtgttcagaaaggctgctgatgacacctgggagccatttgcctctgggaaaaccagtgagtctggagagctgcatgggctcacaactgaggaggaatttgtagaagggatatacaaagtggaaatagacaccaaatcttactggaaggcacttggcatctccccattccatgagcatgcagaggtggtattcacagccaacgactccggcccccgccgctacaccattgccgccctgctgagcccctactcctattccaccacggctgtcgtcaccaatcccaaggaatgagggacttctcctccagtggacctgaaggacgagggatgggatttcatgtaaccaagagtattccatttttactaaagcagtgttttcacctcatatgctatgttagaagtccaggcagagacaataaaacattcctgtgaaaggcacttttcattccactttaacttgattttttaaattcccttattgtcccttccaaaaaaaagagaatcaaaattttacaaagaatcaaaggaattctagaaagtatctgggcagaacgctaggagagatccaaatttccattgtcttgcaagcaaagcacgtattaaatatgatctgcagccattaaaaagacacattctgtaaaaaaaaaaaa

SEQ ID NO: 17 - DNA, 16 bp, Artificial sequence
  Synthetic oligonucleotide
ttgatttaatggttgc

SEQ ID NO: 18 - DNA, 16 bp, Artificial sequence
  Synthetic oligonucleotide
tgatttaatggttgca

SEQ ID NO: 19 - DNA, 16 bp, Artificial sequence
  Synthetic oligonucleotide
gatttaatggttgcaa

SEQ ID NO: 20 - DNA, 16 bp, Artificial sequence
  Synthetic oligonucleotide
agtcgcgactctggta

SEQ ID NO: 21 - DNA, 16 bp, Artificial sequence
  Synthetic oligonucleotide
gtcaatatcaaagcac

SEQ ID NO: 22 - DNA, 16 bp, Artificial sequence
  Synthetic oligonucleotide
gaacattattaggcta

SEQ ID NO: 23 - DNA, 16 bp, Artificial sequence
  Synthetic oligonucleotide
ccttatggatgctgct

SEQ ID NO: 24 - DNA, 16 bp, Artificial sequence
  Synthetic oligonucleotide
cattgtactatgccag

SEQ ID NO: 25 - DNA, 20 bp, Artificial sequence
  Synthetic oligonucleotide
tgctccgttggtgcttgttc

SEQ ID NO: 26 - DNA, 20 bp, Artificial sequence
  Synthetic oligonucleotide
tcttcctgtgacagtggtgg

SEQ ID NO: 27 - DNA, 20 bp, Artificial sequence
  Synthetic oligonucleotide
ttcttcctgtgacagtggtg

SEQ ID NO: 28 - DNA, 20 bp, Artificial sequence
  Synthetic oligonucleotide
ggttcttcctgtgacagtgg

SEQ ID NO: 29 - DNA, 20 bp, Artificial sequence
  Synthetic oligonucleotide
cgactatgcgagtgtggtgt

SEQ ID NO: 30 - DNA, 20 bp, Artificial sequence
  Synthetic oligonucleotide
ccgactatgcgagtgtggtg

SEQ ID NO: 31 - DNA, 20 bp, Artificial sequence
  Synthetic oligonucleotide
gcctcagtctgcttcgcacc

SEQ ID NO: 32 - DNA, 20 bp, Artificial sequence
  Synthetic oligonucleotide
agcttcttgtccagctttat

SEQ ID NO: 33 - DNA, 20 bp, Artificial sequence
  Synthetic oligonucleotide
agcatagttaacgagctccc

SEQ ID NO: 34 - DNA, 20 bp, Artificial sequence
  Synthetic oligonucleotide
tgtcatattcctggatcctt

SEQ ID NO: 35 - DNA, 16 bp, Artificial sequence
  Synthetic oligonucleotide
ggacacccacgccccc

SEQ ID NO: 36 - DNA, 20 bp, Artificial sequence
  Synthetic oligonucleotide
ccctcctgtgcctggatgct

SEQ ID NO: 37 - DNA, 16 bp, Artificial sequence
  Synthetic oligonucleotide
gctaaacaaccgcctt

SEQ ID NO: 38 - DNA, 20 bp, Artificial sequence
  Synthetic oligonucleotide
atgcatggtgatgcttctga

SEQ ID NO: 39 - DNA, 16 bp, Artificial sequence
  Synthetic oligonucleotide
catggtgatgcttctg

SEQ ID NO: 40 - DNA, 16 bp, Artificial sequence
  Synthetic oligonucleotide
agagctaaacaaccgc

SEQ ID NO: 41 - DNA, 16 bp, Artificial sequence
  Synthetic oligonucleotide
actcccgggacaccca

SEQ ID NO: 42 - DNA, 16 bp, Artificial sequence
  Synthetic oligonucleotide
acaccctcgcctccgg

SEQ ID NO: 43 - DNA, 16 bp, Artificial sequence
  Synthetic oligonucleotide
gcctccggaacaccca

SEQ ID NO: 44 - DNA, 20 bp, Artificial sequence
  Synthetic oligonucleotide
acggcattggtgcacagttt

SEQ ID NO: 45 - DNA, 20 bp, Artificial sequence
  Synthetic oligonucleotide
gcaaccgggatgatgagtgc

SEQ ID NO: 46 - DNA, 20 bp, Artificial sequence
  Synthetic oligonucleotide
tgcacagtttctggcaggcc

SEQ ID NO: 47 - DNA, 20 bp, Artificial sequence
  Synthetic oligonucleotide
ggcagcggacggcattggtg

SEQ ID NO: 48 - DNA, 20 bp, Artificial sequence
  Synthetic oligonucleotide
ggtgcacagtttctggcagg

SEQ ID NO: 49 - DNA, 20 bp, Artificial sequence
  Synthetic oligonucleotide
gcagccatggtgatcaggag

SEQ ID NO: 50 - DNA, 20 bp, Artificial sequence
  Synthetic oligonucleotide
ggtagaaatatagttgttcc

SEQ ID NO: 51 - DNA, 20 bp, Artificial sequence
  Synthetic oligonucleotide
ttcatgtgtctgcatcatgt

SEQ ID NO: 52 - DNA, 20 bp, Artificial sequence
  Synthetic oligonucleotide
gcatccagcgagcaccaaag

SEQ ID NO: 53 - DNA, 20 bp, Artificial sequence
  Synthetic oligonucleotide
agccatggtgatcaggaggc

SEQ ID NO: 54 - DNA, 20 bp, Artificial sequence
  Synthetic oligonucleotide
cagccatggtgatcaggagg

SEQ ID NO: 55 - DNA, 20 bp, Artificial sequence
  Synthetic oligonucleotide
gtctggattacagcataaac

SEQ ID NO: 56 - DNA, 20 bp, Artificial sequence
  Synthetic oligonucleotide
ggtctggattacagcataaa

SEQ ID NO: 57 - DNA, 20 bp, Artificial sequence
  Synthetic oligonucleotide
ccttggtctggattacagca

SEQ ID NO: 58 - DNA, 20 bp, Artificial sequence
  Synthetic oligonucleotide
ccttggtctggattacagca

SEQ ID NO: 59 - DNA, 20 bp, Artificial sequence
  Synthetic oligonucleotide
gtgcttgtccaggatgatgc

SEQ ID NO: 60 - DNA, 17 bp, Artificial sequence
  Synthetic oligonucleotide
ggttcccgaggtgccca

SEQ ID NO: 61 - DNA, 20 bp, Artificial sequence
  Synthetic oligonucleotide
tccacaggccacaggtgggc

SEQ ID NO: 62 - DNA, 20 bp, Artificial sequence
  Synthetic oligonucleotide
ctctttattgttggaggaca

SEQ ID NO: 63 - DNA, 20 bp, Artificial sequence
  Synthetic oligonucleotide
gcaaggctcggttgggcttc

SEQ ID NO: 64 - DNA, 17 bp, Artificial sequence
  Synthetic oligonucleotide
gggcaatgcagtcctgg

SEQ ID NO: 65 - DNA, 17 bp, Artificial sequence
  Synthetic oligonucleotide
gaaggtgacaccagcct

SEQ ID NO: 66 - DNA, 17 bp, Artificial sequence
  Synthetic oligonucleotide
gctcagcatccacaggc

SEQ ID NO: 67 - DNA, 21 bp, Artificial sequence
  Synthetic oligonucleotide
gggttcccgaggtgcccaatg

SEQ ID NO: 68 - DNA, 20 bp, Artificial sequence
  Synthetic oligonucleotide
gcagaggtgaagcgaagtgc

SEQ ID NO: 69 - DNA, 20 bp, Artificial sequence
  Synthetic oligonucleotide
aatggtttattccatggcca

SEQ ID NO: 70 - DNA, 20 bp, Artificial sequence
  Synthetic oligonucleotide
ggtttattccatggccattg

SEQ ID NO: 71 - DNA, 20 bp, Artificial sequence
  Synthetic oligonucleotide
aaatggtttattccatggcc

SEQ ID NO: 72 - DNA, 18 bp, Artificial sequence
  Synthetic oligonucleotide
aatggtttattccatggc

SEQ ID NO: 73 - DNA, 16 bp, Artificial sequence
  Synthetic oligonucleotide
ctatttggatgtcagc

SEQ ID NO: 74 - DNA, 20 bp, Artificial sequence
  Synthetic oligonucleotide
tcttggttacatgaaatccc

SEQ ID NO: 75 - DNA, 20 bp, Artificial sequence
  Synthetic oligonucleotide
cttggttacatgaaatccca

SEQ ID NO: 76 - DNA, 20 bp, Artificial sequence
  Synthetic oligonucleotide
ggaatactcttggttacatg

SEQ ID NO: 77 - DNA, 20 bp, Artificial sequence
  Synthetic oligonucleotide
tggaatactcttggttacat

SEQ ID NO: 78 - DNA, 20 bp, Artificial sequence
  Synthetic oligonucleotide
ttttattgtctctgcctgga

SEQ ID NO: 79 - DNA, 20 bp, Artificial sequence
  Synthetic oligonucleotide
gaatgttttattgtctctgc

SEQ ID NO: 80 - DNA, 20 bp, Artificial sequence
  Synthetic oligonucleotide
aggaatgttttattgtctct

SEQ ID NO: 81 - DNA, 20 bp, Artificial sequence
  Synthetic oligonucleotide
acaggaatgttttattgtct

SEQ ID NO: 82 - DNA, 3731 bp, Homo sapiens
gtccgatggggctctggtggcgtgatctgcgcgccccaggcgtcaagcacccacaccctagaaggtttccgcagcgacgtcgaggcgctcatggttgcaggcgggcgccgccgttcagttcagggtctgagcctggaggagtgagccaggcagtgagactggctcgggcgggccgggacgcgtcgttgcagcagcggctcccagctcccagccaggattccgcgcgccccttcacgcgccctgctcctgaacttcagctcctgcacagtcctccccaccgcaaggctcaaggcgccgccggcgtggaccgcgcacggcctctaggtctcctcgccaggacagcaacctctcccctggccctcatgggcaccgtcagctccaggcggtcctggtggccgctgccactgctgctgctgctgctgctgctcctgggtcccgcgggcgcccgtgcgcaggaggacgaggacggcgactacgaggagctggtgctagccttgcgttccgaggaggacggcctggccgaagcacccgagcacggaaccacagccaccttccaccgctgcgccaaggatccgtggaggttgcctggcacctacgtggtggtgctgaaggaggagacccacctctcgcagtcagagcgcactgcccgccgcctgcaggcccaggctgcccgccggggatacctcaccaagatcctgcatgtcttccatggccttcttcctggcttcctggtgaagatgagtggcgacctgctggagctggccttgaagttgccccatgtcgactacatcgaggaggactcctctgtctttgcccagagcatcccgtggaacctggagcggattacccctccacggtaccgggcggatgaataccagccccccgacggaggcagcctggtggaggtgtatctcctagacaccagcatacagagtgaccaccgggaaatcgagggcagggtcatggtcaccgacttcgagaatgtgcccgaggaggacgggacccgcttccacagacaggccagcaagtgtgacagtcatggcacccacctggcaggggtggtcagcggccgggatgccggcgtggccaagggtgccagcatgcgcagcctgcgcgtgctcaactgccaagggaagggcacggttagcggcaccctcataggcctggagtttattcggaaaagccagctggtccagcctgtggggccactggtggtgctgctgcccctggcgggtgggtacagccgcgtcctcaacgccgcctgccagcgcctggcgagggctggggtcgtgctggtcaccgctgccggcaacttccgggacgatgcctgcctctactccccagcctcagctcccgaggtcatcacagttggggccaccaatgcccaagaccagccggtgaccctggggactttggggaccaactttggccgctgtgtggacctctttgccccaggggaggacatcattggtgcctccagcgactgcagcacctgctttgtgtcacagagtgggacatcacaggctgctgcccacgtggctggcattgcagccatgatgctgtctgccgagccggagctcaccctggccgagttgaggcagagactgatccacttctctgccaaagatgtcatcaatgaggcctggttccctgaggaccagcgggtactgacccccaacctggtggccgccctgccccccagcacccatggggcaggttggcagctgttttgcaggactgtatggtcagcacactcggggcctacacggatggccacagccgtcgcccgctgcgccccagatgaggagctgctgagctgctccagtttctccaggagtgggaagcggcggggcgagcgcatggaggcccaagggggcaagctggtctgccgggcccacaacgcttttgggggtgagggtgtctacgccattgccaggtgctgcctgctaccccaggccaactgcagcgtccacacagctccaccagctgaggccagcatggggacccgtgtccactgccaccaacagggccacgtcctcacaggctgcagctcccactgggaggtggaggaccttggcacccacaagccgcctgtgctgaggccacgaggtcagcccaaccagtgcgtgggccacagggaggccagcatccacgcttcctgctgccatgccccaggtctggaatgcaaagtcaaggagcatggaatcccggcccctcaggagcaggtgaccgtggcctgcgaggagggctggaccctgactggctgcagtgccctccctgggacctcccacgtcctgggggcctacgccgtagacaacacgtgtgtagtcaggagccgggacgtcagcactacaggcagcaccagcgaaggggccgtgacagccgttgccatctgctgccggagccggcacctggcgcaggcctcccaggagctccagtgacagccccatcccaggatgggtgtctggggagggtcaagggctggggctgagctttaaaatggttccgacttgtccctctctcagccctccatggcctggcacgaggggatggggatgcttccgcctttccggggctgctggcctggcccttgagtggggcagcctccttgcctggaactcactcactctgggtgcctcctccccaggtggaggtgccaggaagctccctccctcactgtggggcatttcaccattcaaacaggtcgagctgtgctcgggtgctgccagctgctcccaatgtgccgatgtccgtgggcagaatgacttttattgagctcttgttccgtgccaggcattcaatcctcaggtctccaccaaggaggcaggattcttcccatggataggggagggggcggtaggggctgcagggacaaacatcgttggggggtgagtgtgaaaggtgctgatggccctcatctccagctaactgtggagaagcccctgggggctccctgattaatggaggcttagctttctggatggcatctagccagaggctggagacaggtgcgcccctggtggtcacaggctgtgccttggtttcctgagccacctttactctgctctatgccaggctgtgctagcaacacccaaaggtggcctgcggggagccatcacctaggactgactcggcagtgtgcagtggtgcatgcactgtctcagccaacccgctccactacccggcagggtacacattcgcacccctacttcacagaggaagaaacctggaaccagagggggcgtgcctgccaagctcacacagcaggaactgagccagaaacgcagattgggctggctctgaagccaagcctcttcttacttcacccggctgggctcctcatttttacgggtaacagtgaggctgggaaggggaacacagaccaggaagctcggtgagtgatggcagaacgatgcctgcaggcatggaactttttccgttatcacccaggcctgattcactggcctggcggagatgcttctaaggcatggtcgggggagagggccaacaactgtccctccttgagcaccagccccacccaagcaagcagacatttatcttttgggtctgtcctctctgttgcctttttacagccaacttttctagacctgttttgcttttgtaacttgaagatatttattctgggttttgtagcatttttattaatatggtgactttttaaaataaaaacaaacaaacgttgtcctaacaaaaaaaaaaaaaaaaaaaaa

SEQ ID NO: 83 - DNA, 20 bp, Artificial sequence
  Synthetic oligonucleotide
ccttggccacgccggcatcc

SEQ ID NO: 84 - DNA, 20 bp, Artificial sequence
  Synthetic oligonucleotide
gtcacacttgctggcctgtc

SEQ ID NO: 85 - DNA, 20 bp, Artificial sequence
  Synthetic oligonucleotide
tggcagtggacacgggtccc

SEQ ID NO: 86 - DNA, 20 bp, Artificial sequence
  Synthetic oligonucleotide
actcaccgagcttcctggtc

SEQ ID NO: 87 - DNA, 20 bp, Artificial sequence
  Synthetic oligonucleotide
atcccacgcccctgtccagc

SEQ ID NO: 88 - DNA, 20 bp, Artificial sequence
  Synthetic oligonucleotide
ggacattgccagtaatcgca

SEQ ID NO: 89 - DNA, 20 bp, Artificial sequence
  Synthetic oligonucleotide
tgcaagtctcttggcaaaca

SEQ ID NO: 90 - DNA, 20 bp, Artificial sequence
  Synthetic oligonucleotide
agcatagattttgacttccc

SEQ ID NO: 91 - DNA, 20 bp, Artificial sequence
  Synthetic oligonucleotide
ccacctttgggtgaatagca

SEQ ID NO: 92 - DNA, 20 bp, Artificial sequence
  Synthetic oligonucleotide
actcaacttgaggacaataa

SEQ ID NO: 93 - DNA, 16 bp, Artificial sequence
  Synthetic oligonucleotide
agctgaaggcaaccag

SEQ ID NO: 94 - DNA, 16 bp, Artificial sequence
  Synthetic oligonucleotide
agagttgacatgggca

SEQ ID NO: 95 - DNA, 16 bp, Artificial sequence
  Synthetic oligonucleotide
ccagtagtcaatatta

SEQ ID NO: 96 - DNA, 16 bp, Artificial sequence
  Synthetic oligonucleotide
ctcaacttgaggacaa

SEQ ID NO: 97 - DNA, 16 bp, Artificial sequence
  Synthetic oligonucleotide
agtatattcagtccaa

SEQ ID NO: 98 - DNA, 16 bp, Artificial sequence
  Synthetic oligonucleotide
tggcaagcatcctgta

SEQ ID NO: 99 - DNA, 16 bp, Artificial sequence
  Synthetic oligonucleotide
ctcaatccatggcagc

SEQ ID NO: 100 - DNA, 16 bp, Artificial sequence
  Synthetic oligonucleotide
accaagtttcttcagc

SEQ ID NO: 101 - DNA, 13 bp, Artificial sequence
  Synthetic oligonucleotide
gcattggtattca

SEQ ID NO: 102 - DNA, 20 bp, Artificial sequence
  Synthetic oligonucleotide
ttcagcattggtattcagtg

SEQ ID NO: 103 - DNA, 16 bp, Artificial sequence
  Synthetic oligonucleotide
cagcattggtattcag

SEQ ID NO: 104 - DNA, 15 bp, Artificial sequence
  Synthetic oligonucleotide
cagcattggtattca

SEQ ID NO: 105 - DNA, 14 bp, Artificial sequence
  Synthetic oligonucleotide
agcattggtattca

SEQ ID NO: 106 - DNA, 12 bp, Artificial sequence
  Synthetic oligonucleotide
gcattggtattc

SEQ ID NO: 107 - DNA, 14 bp, Artificial sequence
  Synthetic oligonucleotide
tgctacaaaaccca

SEQ ID NO: 108 - DNA, 16 bp, Artificial sequence
  Synthetic oligonucleotide
cccattgtcacactcc

SEQ ID NO: 109 - DNA, 18 bp, Artificial sequence
  Synthetic oligonucleotide
cggcatgtctattttgta

SEQ ID NO: 110 - DNA, 20 bp, Artificial sequence
  Synthetic oligonucleotide
ggctaaatcgctccaccaag

SEQ ID NO: 111 - DNA, 20 bp, Artificial sequence
  Synthetic oligonucleotide
ctctagcgtcttaaagccga

SEQ ID NO: 112 - DNA, 20 bp, Artificial sequence
  Synthetic oligonucleotide
gctgcatgatctccttggcg

SEQ ID NO: 113 - DNA, 20 bp, Artificial sequence
  Synthetic oligonucleotide
acgttgaggggcatcgtcgc

SEQ ID NO: 114 - DNA, 20 bp, Artificial sequence
  Synthetic oligonucleotide
cggttagaagactcatcttt

SEQ ID NO: 115 - DNA, 30 bp, Artificial sequence
  Synthetic oligonucleotide
ctccaacatcaaggaagatggcatttctag

SEQ ID NO: 116 - DNA, 23 bp, Artificial sequence
  Synthetic oligonucleotide
  misc_feature (12)..(12): n is a, c, g, or t
gaatattaacanactgacaagtc

SEQ ID NO: 117 - DNA, 21 bp, Artificial sequence
  Synthetic oligonucleotide
  misc_feature (9)..(9): n is a, c, g, or t
  misc_feature (19)..(19): n is a, c, g, or t
cgttgatanttctgccatnct

SEQ ID NO: 118 - DNA, 19 bp, Artificial sequence
  Synthetic oligonucleotide
gccatggttttttctcagg

SEQ ID NO: 119 - DNA, 20 bp, Artificial sequence
  Synthetic oligonucleotide
cctgccctttgttctagttg

SEQ ID NO: 120 - DNA, 19 bp, Artificial sequence
  Synthetic oligonucleotide
gggtctgcagcgggatggt

SEQ ID NO: 121 - DNA, 21 bp, Artificial sequence
  Synthetic oligonucleotide
gttactacttccacctgcctg

SEQ ID NO: 122 - DNA, 25 bp, Artificial sequence
  Synthetic oligonucleotide
tatccggagggctcgccatgctgct

SEQ ID NO: 123 - DNA, 21 bp, Artificial sequence
  Synthetic oligonucleotide
gtcgccccttctccccgcagc

SEQ ID NO: 124 - DNA, 18 bp, Artificial sequence
  Synthetic oligonucleotide
ggaccctcctccggagcc

SEQ ID NO: 125 - DNA, 23 bp, Artificial sequence
  Synthetic oligonucleotide
accaggcgtctcgtggggcacat

SEQ ID NO: 126 - DNA, 18 bp, Artificial sequence
  Synthetic oligonucleotide
tctcccagcgtgcgccat

SEQ ID NO: 127 - DNA, 15 bp, Artificial sequence
  Synthetic oligonucleotide
gtgctccattgatgc

SEQ ID NO: 128 - DNA, 20 bp, Artificial sequence
  Synthetic oligonucleotide
tcccgcctgtgacatgcatt

SEQ ID NO: 129 - DNA, 21 bp, Artificial sequence
  Synthetic oligonucleotide
cagcagcagagtcttcatcat

SEQ ID NO: 130 - DNA, 20 bp, Artificial sequence
  Synthetic oligonucleotide
gggacgcggcgctcggtcat

SEQ ID NO: 131 - DNA, 20 bp, Artificial sequence
  Synthetic oligonucleotide
ccacaagctgtccagtctaa

SEQ ID NO: 132 - DNA, 20 bp, Artificial sequence
  Synthetic oligonucleotide
ccgcagccatgcgctcttgg

SEQ ID NO: 133 - DNA, 20 bp, Artificial sequence
  Synthetic oligonucleotide
tcagggcattctttccattc

SEQ ID NO: 134 - DNA, 20 bp, Artificial sequence
  Synthetic oligonucleotide
cgaaggaaacaatactccga

SEQ ID NO: 135 - DNA, 20 bp, Artificial sequence
  Synthetic oligonucleotide
gacagcagccgcagcagaaa

SEQ ID NO: 136 - DNA, 20 bp, Artificial sequence
  Synthetic oligonucleotide
tggaaaggcttatacccctc

SEQ ID NO: 137 - DNA, 20 bp, Artificial sequence
  Synthetic oligonucleotide
tcaaggaagatggcatttct

SEQ ID NO: 138 - RNA, 16 nt, Artificial sequence
  Synthetic oligonucleotide
guggcuaacagaagcu

SEQ ID NO: 139 - RNA, 25 nt, Artificial sequence
  Synthetic oligonucleotide
uuugccgcugcccaaugccauccug

SEQ ID NO: 140 - DNA, 18 bp, Artificial sequence
  Synthetic oligonucleotide
  misc_feature (1)..(4): bases at these positions are RNA
  misc_feature (15)..(18): bases at these positions are RNA
gcgugcctcctcacuggc

SEQ ID NO: 141 - DNA, 21 bp, Artificial sequence
  Synthetic oligonucleotide
agcttcagtcatgacttcctt

SEQ ID NO: 142 - DNA, 21 bp, Artificial sequence
  Synthetic oligonucleotide
tggtaatccactttcagagga

SEQ ID NO: 143 - DNA, 20 bp, Artificial sequence
  Synthetic oligonucleotide
gttctcgctggtgagtttca

SEQ ID NO: 144 - DNA, 20 bp, Artificial sequence
  Synthetic oligonucleotide
cagctttattagggacagca

SEQ ID NO: 145 - DNA, 21 bp, Artificial sequence
  Synthetic oligonucleotide
cagctttattagggacagcaa

SEQ ID NO: 146 - DNA, 16 bp, Artificial sequence
  Synthetic oligonucleotide
accatgataccacttt

SEQ ID NO: 147 - DNA, 20 bp, Artificial sequence
  Synthetic oligonucleotide
gcttcagtcatgacttcctt

SEQ ID NO: 148 - DNA, 20 bp, Artificial sequence
  Synthetic oligonucleotide
cagctttattagggacagca

SEQ ID NO: 149 - DNA, 14 bp, Artificial sequence
  Synthetic oligonucleotide
tcagtcatgacttc

1. A composition for non-parenteral administration comprising:
a conjugated oligomeric compound having a conjugate group comprising from 1 to 3 moieties having Formula I: [chemical structure]
wherein independently for each moiety having formula I:
R₁ is selected from Q₁, CH₂Q₁, CH₂NJ₁J₂, CH₂N₃ and CH₂SJ₃;
Q₁ is selected from aryl, substituted aryl, heterocyclic, substituted heterocyclic, heteroaryl and substituted heteroaryl;
R₂ is selected from N₃, CN, halogen, N(H)C(═O)-Q₂, substituted thiol, aryl, substituted aryl, heterocyclic, substituted heterocyclic, heteroaryl and substituted heteroaryl;
Q₂ is selected from H, C₁-C₆ alkyl, substituted C₁-C₆ alkyl, C₁-C₆ alkoxy, substituted C₁-C₆ alkoxy, aryl, substituted aryl, heterocyclic, substituted heterocyclic, heteroaryl and substituted heteroaryl;
Y is O;
J₁, J₂ and J₃ are each, independently, H or a substituent group; and
each substituent group is, independently, mono or poly substituted with optionally protected substituent groups independently selected from halogen, C₁-C₆ alkyl, C₁-C₆ alkoxy, aryl, heterocyclic and heteroaryl wherein each substituent group can include a linear or branched alkylene group optionally including one or more groups independently selected from O, S, NH and C(═O), and wherein each substituent group may be further substituted with one or more groups independently selected from C₁-C₆ alkyl, halogen or C₁-C₆ alkoxy wherein each cyclic group is mono or polycyclic; and
an excipient.

2. (canceled)

3. The composition of claim 1, comprising one moiety having Formula I that is linked to the oligomeric compound through a connecting group.

4. The composition of claim 1 comprising 2 or 3 moieties of formula 1 that are linked to the oligomeric compound through a connecting group that comprises a branching group.

5-15. (canceled)

16. The composition of claim 1, wherein each R₂ is N(H)C(═O)—CH₃.

17-38. (canceled)

39. The composition of claim 1, wherein each moiety of Formula I has the configuration:

[chemical structure]

40-41. (canceled)

42. The composition of claim 1, wherein the oligomeric compound comprises at least one modified nucleoside comprising a modified base and or a modified sugar moiety.

43-48. (canceled)

49. The composition of claim 42 wherein the oligomeric compound comprises at least one modified nucleoside comprising a modified sugar moiety selected from a bicyclic nucleoside and a 2′-modified nucleoside.

50. The composition of claim 49, wherein the oligomeric compound comprises at least one 4′-C(CH₃)H—O-2′- or 4′-CH₂—O-2′ bridged bicyclic nucleoside.

51-53. (canceled)

54. The composition of claim 49, wherein the oligomeric compound comprises at least one 2′-F, 2′-OCH₃ or 2′-O(CH₂)₂OCH₃ substituted 2′-modified nucleoside.

55-71. (canceled)

72. The composition of claim 1, wherein the oligomeric compound is a single-stranded antisense compound.

73-77. (canceled)

78. The composition of claim 1, wherein the conjugate group is attached to the 5′-terminal nucleoside or the 3′-terminal nucleoside of the oligomeric compound.

79-84. (canceled)

85. The composition of claim 1, wherein the oligomeric compound has a sugar motif comprising:
a 5′-region consisting of 2-8 linked 5′-region nucleosides, wherein at least two 5′-region nucleosides are modified nucleosides and wherein the 3′-most 5′-region nucleoside is a modified nucleoside;
a 3′-region consisting of 2-8 linked 3′-region nucleosides, wherein at least two 3′-region nucleosides are modified nucleosides and wherein the 5′-most 3′-region nucleoside is a modified nucleoside; and
a central region between the 5′-region and the 3′-region consisting of 5-10 linked central region nucleosides, each independently selected from among: a modified nucleoside and an unmodified deoxynucleoside, wherein the 5′-most central region nucleoside is an unmodified deoxynucleoside and the 3′-most central region nucleoside is an unmodified deoxynucleoside.

86. The composition of claim 85, wherein the 5′-region consists of 2 or 3 linked 5′-region nucleosides, the 3′-region consists of 2 or 3 linked 3′-region nucleosides and the central regions consists of 10 linked central region nucleosides.

87-101. (canceled)

102. The composition of claim 85, wherein the oligomeric compound consists of 16 to 20 linked nucleosides.

103-120. (canceled)

121. The composition of claim 1, wherein each internucleoside linkage is independently a phosphodiester or a phosphorothioate internucleoside linkage.

122-155. (canceled)

156. The composition of claim 1, wherein the excipient comprises at least one penetration enhancer.

157-161. (canceled)

162. The composition of claim 156 wherein the penetration enhancer comprises sodium caprate (C10) and/or sodium caprylate (C12).

163. The composition of claim 1 wherein the composition is a capsule, tablet, compression coated tablet or bilayer tablet optionally including an enteric coating.

164-180. (canceled)

181. The composition of claim 1, wherein the target nucleic acid is an mRNA.

182. (canceled)

183. The composition of claim 1, wherein the target nucleic acid is expressed in the liver.

184. The composition of claim 1, wherein the target nucleic acid is expressed in hepatocytes.

185-213. (canceled)

214. The composition of claim 1, wherein the administration is oral.

215. The composition of claim 1, wherein the administration is by enema.

216-403. (canceled)
